(19) United States
(12) Patent Application Publication
(10) Pub. No.: US 2004/0236072 A1
(43) Pub. Date: Nov. 25, 2004

(54) Surface proteins of streptococcus pyogenes

(76) Inventors: Stephen Bruce Olmsted, West Nyack, NY (US); Robert John Zagursky, Victor, NY (US); Elliott Bruce Nickbarg, Belmont, MA (US); Laurie Anne Winter, Brockport, NY (US)

Correspondence Address: HUNTON & WILLIAMS LLP, INTELLECTUAL PROPERTY DEPARTMENT, 1900 K STREET, N.W., SUITE 1200, WASHINGTON, DC, 20006-1109, US

(21) Appl. No.: 10/474,792

(22) PCT Filed: Apr. 12, 2002
(86) PCT No.: PCT/US02/11610

Related U.S. Application Data
(60) Provisional application No. 60/283,358, filed on Apr. 13, 2001.

(51) Int. Cl. C07K 1/00; C07K 14/00; C07K 17/00

(52) U.S. Cl. 530/350

(57) ABSTRACT

β-hemolytic streptococci polynucleotides, polypeptides, particularly Streptococcus pyogenes polypeptides and polynucleotides, and antibodies of these polypeptides are described. The polynucleotides, polypeptides, and antibodies of the invention can be formulated for use as immunogenic compositions. Also disclosed are methods for immunizing against and reducing β-hemolytic streptococcal infection, and for detecting β-hemolytic streptococci in a biological sample.

### FIELD OF THE INVENTION

[0001] This invention relates generally to β-hemolytic streptococcal polypeptides and polynucleotides, particularly Streptococcus pyogenes polypeptides and polynucleotides. More specifically, the invention relates to polypeptides of Streptococcus pyogenes which are surface localized, and antibodies of these polypeptides. The invention also relates to nucleotide sequences encoding polypeptides of Streptococcus pyogenes, and expression vectors including these nucleotide sequences. The invention further relates to immunogenic compositions, and methods for immunizing against and reducing β-hemolytic streptococcal infection. The invention also relates to methods of detecting these nucleotides and polypeptides and for detecting β-hemolytic streptococci and Streptococcus pyogenes in a biological sample.

### BACKGROUND OF THE INVENTION

[0002] Traditional phenotypic criteria for classification of streptococci include both hemolytic reactions and Lancefield serological groupings. However, with taxonomic advances, it is now known that unrelated species of β-hemolytic (defined as the complete lysis of sheep erythrocytes in agar plates) streptococci may produce identical Lancefield antigens and that strains genetically related at the species level may have heterogeneous Lancefield antigens. In spite of these exceptions to the traditional rules of streptococcal taxonomy, hemolytic reactions and Lancefield serological tests can still be used to divide streptococci into broad categories as a first step in identification of clinical isolates. Ruoff, K. L., R. A. Whiley, and D. Beighton. 1999. Streptococcus. In P. R. Murray, E. J. Baron, M. A. Pfaller, F. C. Tenover, and R. H. Yolken (eds.), Manual of Clinical Microbiology. American Society of Microbiology Press, Washington D.C.

[0003] β-hemolytic isolates with Lancefield group A, C, or G antigen can be subdivided into two groups: large-colony (>0.5 mm in diameter) and small-colony (<0.5 mm in diameter) formers. Large-colony-forming group A (Streptococcus pyogenes), C, and G strains are “pyogenic” streptococci replete with a variety of effective virulence mechanisms. Streptococcus agalactiae (group B) is still identified reliably by its production of Lancefield group B antigen or other phenotypic traits.

[0004] A need exists to develop compositions and methods to ameliorate and prevent infections caused by β-hemolytic streptococci, including groups A, B, C and G. Similarity between these species includes not only virulence factors, but also disease manifestations. Included in the latter are pneumonia, arthritis, abscesses, rhinopharyngitis, metritis, puerperal sepsis, neonatal septicemia, wound infections, meningitis, peritonitis, cellulitis, pyoderma, necrotizing fasciitis, toxic shock syndrome, septicemia, infective endocarditis, pericarditis, glomerulonephritis, and osteomyelitis.

[0005] Streptococcus pyogenes are gram-positive diplococci that colonize the pharynx and skin of humans, sites that then serve as the primary reservoir for this organism. An obligate parasite, this bacterium is transmitted by either direct contact of respiratory secretions or by hand-to-mouth. The majority of Streptococcus pyogenes infections are relatively mild illnesses, such as pharyngitis or impetigo. Currently, there are anywhere from twenty million to thirty-five million cases of pharyngitis alone in the U.S., costing about $2 billion for physician visits and other related expenses. Additionally, nonsuppurative sequelae such as rheumatic fever, scarlet fever, and glomerulonephritis result from Streptococcus pyogenes infections. Globally, acute rheumatic fever (ARF) is the most common cause of pediatric heart disease (Bibliography entry 1).

[0006] From the initial portals of entry, pharynx, and skin, Streptococcus pyogenes can disseminate to other parts of the body where bacteria are not usually found, such as the blood, deep muscle and fat tissue, or the lungs, and can cause invasive infections. Two of the most severe but least common forms of invasive Streptococcus pyogenes disease are necrotizing fasciitis and streptococcal toxic shock syndrome (STSS). Necrotizing fasciitis (described in the media as “flesh-eating bacteria”) is a destructive infection of muscle and fat tissue. STSS is a rapidly progressing infection causing shock and injury to internal organs such as the kidneys, liver, and lungs. Much of this damage is due to a toxemia rather than localized damage due to bacterial growth.

[0007] In 1995, invasive Streptococcus pyogenes infections and STSS became mandated reportable diseases. In contrast to the millions of individuals that acquire pharyngitis and impetigo, the U.S. Centers for Disease Control and Prevention (CDC) mandated case reporting indicates that in 1997 there were from 15,000 to 20,000 cases of invasive Streptococcus pyogenes disease in the United States, resulting in over 2,000 deaths (1). Other reports estimate invasive disease to be as high as 10-20 cases per 100,000 individuals per year (62). More specifically, of the 15,000 to 20,000 cases of invasive disease, 1,100 to 1,500 are cases of necrotizing fasciitis and 1,000 to 1,400 are cases of STSS, with a 20% and 60% mortality rate, respectively. Also included in serious invasive disease are cases of myositis, which carries a fatality rate of 80% to 100%. An additional 10% to 15% of individuals with other forms of invasive group A streptococcal disease die. These numbers have increased since case reporting was initiated in 1995 and reflect a general trend that has occurred over the past decade or two. Additionally, it is commonly agreed that the stringency of the case definitions results in lower and, thus, misleading numbers, in that many cases are successfully resolved due to early diagnosis and treatment before the definition has been met.

[0008] While Streptococcus pyogenes remains exquisitely sensitive to penicillin and its derivatives, treatment does not necessarily eradicate the organism. Approximately 5% to 20% of the human population remain carriers depending on the season (62), despite antibiotic therapy. The reasons for this are not totally clear and may involve a variety of mechanisms. In cases of serious invasive infections, treatment often requires aggressive surgical intervention. For those cases involving STSS or related disease, clindamycin (a protein synthesis inhibitor) is the preferred antibiotic as it penetrates tissues well and prevents exotoxin production. There are reports of some resistance to tetracycline, sulfa, and most recently, erythromycin. Clearly, there remains a need for compositions to prevent and treat β-hemolytic infection.

[0009] Numerous virulence factors have been identified for Streptococcus pyogenes, some secreted and some surface localized. Although it is encapsulated, the capsule is composed of hyaluronic acid and is not suitable as a candidate antigen for inclusion in immunogenic compositions, since it is commonly expressed by mammalian cells and is nonimmunogenic (14). The T antigen and Group Carbohydrate are other candidates, but may also elicit cross-reactive antibodies to heart tissue. Lipoteichoic acid is present on the surface of Streptococcus pyogenes, but raises safety concerns similar to LPS.

[0010] The most abundant surface proteins fall into a family of proteins referred to as M or “M-like” proteins because of their structural similarity. While members of this class have similar biological roles in inhibiting phagocytosis, they each have unique substrate binding properties. The best characterized protein of this family is the helical M protein. Antibodies directed to homologous M strains have been shown to be opsonic and protective (12, 13, 16). Complicating the use of M protein as a candidate antigen is the fact that there have been approximately 100 different serotypes of M protein identified with several more untyped. Typically, the Class I M serotypes, exemplified by serotypes M1, M3, M6, M12, and M18, are associated with pharyngitis, scarlet fever, and rheumatic fever and do not express immunoglobulin binding proteins. Class II M serotypes, such as M2 and M49, are associated with the more common localized skin infections and the sequelae glomerulonephritis, and do express immunoglobulin binding proteins (54). It is important to note that there is little, if any, heterologous cross-reactivity of antibodies to M serotypes. Equally important is the role these antibodies play in rheumatic fever. Specific regions of M protein elicit antibodies that cross react with host heart tissue, causing or at least correlating with cellular damage (11, 57).

[0011] M and M-like proteins belong to a large family of surface localized proteins that are defined by the sortase-targeted LPXTG motif (38, 64). This motif, located near the carboxy-terminus of the protein, is first cleaved by sortase between the threonine and glycine residues of the LPXTG motif. Once cleaved, the protein is covalently attached via the carboxyl of threonine to a free amide group of the amino acid cross-bridge in the peptidoglycan, thus permanently attaching the protein to the surface of the bacterial cell. Included in this family of sortase-targeted proteins are the C5a peptidase (6, 7), adhesins for fibronectin (9, 19, 23, 24), vitronectin, and type IV collagen, and other M-like proteins that bind plasminogen, IgA, IgG, and albumin (31).

[0012] Numerous secreted proteins have been described, several of which are considered to be toxins. Most Streptococcus pyogenes isolates from cases of serious invasive disease and streptococcal toxic shock syndrome (STSS) produce streptococcal pyrogenic exotoxins (SPE) A and C (8). Other pyrogenic exotoxins have also been identified in the genomic Streptococcus pyogenes sequence completed at the University of Oklahoma, submitted to GenBank and assigned accession number AE004092, and have been characterized (55). Other toxins such as Toxic Shock Like Syndrome toxin, Streptococcal Superantigen (58), and Mitogenic Factor (66) play lesser-defined roles in disease. Streptolysin O could also be considered a possible candidate antigen, because it causes the release of IL-β release. In addition, a variety of secreted enzymes have also been identified that include the Cysteine protease (35, 37), Streptokinase (26, 48), and Hyaluronidase (27, 28).

[0013] Given the number of known virulence factors produced by Streptococcus pyogenes, it is clear that an important characteristic for a successful β-hemolytic streptococcal immunogenic composition would be its ability to stimulate a response that would prevent or limit colonization early in the infection process. This protective response would either block adherence and/or enhance the clearance of cells through opsonophagocytosis. Antibodies to M protein have been shown to be opsonic and provide a mechanism to overcome the anti-phagocytic properties of the protein (30) in much the same way that anti-serotype B capsular antibodies have demonstrated protection from disease caused by Haemophilus influenzae B (36). In addition, antibodies specific to Protein F have been shown to block adherence and internalization by tissue culture cells (43).

[0014] There remains a need to further identify immunogenic compositions, and methods for the prevention or amelioration of β-hemolytic streptococcal colonization or infection. There also remains a need to further identify surface proteins of Streptococcus pyogenes and polynucleotides that encode Streptococcus pyogenes polypeptides. Also, there remains a need for methods of detecting β-hemolytic streptococci and Streptococcus pyogenes colonization or infection.

### SUMMARY OF THE INVENTION

[0015] To meet these and other needs, and in view of its purposes, the present invention provides compositions and methods for the prevention or amelioration of β-hemolytic streptococcal colonization or infection. The invention also provides Streptococcus pyogenes polypeptides and polynucleotides, recombinant materials, and methods for their production. Another aspect of the invention relates to methods for using such Streptococcus pyogenes polypeptides and polynucleotides.

[0016] The polypeptides of the invention include isolated polypeptides comprising at least one of an amino acid sequence of any of even numbered SEQ ID NOS: 2-668. The invention also includes amino acid sequences that have at least 70% identity to any of an amino acid sequence of even numbered SEQ ID NOS: 2-668, and mature polypeptides of the amino acid sequences any of even numbered SEQ ID NOS: 2-668. The invention further includes immunogenic fragments and biological equivalents of these polypeptides. Also provided are antibodies that immunospecifically bind to the polypeptides of the invention.

[0017] The polynucleotides of the invention include isolated polynucleotides that comprise nucleotide sequences that encode a polypeptide of the invention. These polynucleotides include isolated polynucleotides comprising at least one of a nucleotide sequence of any of odd numbered SEQ ID NOS: 1-667, and also include other nucleotide sequences that, as a result of the degeneracy of the genetic code, also encode a polypeptide of the invention. The invention also includes isolated polynucleotides comprising a nucleotide sequence that has at least 70% identity to a nucleotide sequence that encodes a polypeptide of the invention, and isolated polynucleotides comprising a nucleotide sequences that has at least 70% identity to a nucleotide sequence any of odd numbered SEQ ID NOS: 1-667. In addition, the isolated polynucleotides of the invention include nucleotide sequences that hybridize under stringent hybridization conditions to a nucleotide sequence that encodes a polypeptide of the invention, nucleotide sequences that hybridize under stringent hybridization conditions to a nucleotide sequence of any of odd numbered SEQ ID NOS: 1-667, and nucleotide sequences that are fully complementary to these polynucleotides. Furthermore, the invention includes expression vectors and host cells comprising these polynucleotides.

[0018] The invention further provides methods for producing the polypeptides of the invention. In one embodiment, the method comprises the steps of (a) culturing a recombinant host cell of the invention under conditions suitable to produce a polypeptide of the invention and (b) recovering the polypeptide from the culture.

[0019] The invention also provides immunogenic compositions. In one embodiment, the immunogenic compositions comprise an immunogenic amount of at least one component which comprises a polypeptide of the invention in an amount effective to prevent or ameliorate a β-hemolytic streptococcal colonization or infection in a susceptible mammal. The component may comprise the polypeptide itself, or may comprise the polypeptide and any other substance (e.g., one or more chemical agents, proteins, etc.) that can aid in the prevention and/or amelioration of β-hemolytic streptococcal colonization or infection. These immunogenic compositions can further comprise at least a portion of the polypeptide, optionally conjugated or linked to a peptide, polypeptide, or protein, or to a polysaccharide. In another embodiment, the immunogenic compositions comprise an immunogenic amount of a component which comprises a polynucleotide of the invention, the component being in an amount effective to prevent or ameliorate a β-hemolytic streptococcal colonization or infection in a susceptible mammal. The component may comprise the polynucleotide itself, or may comprise the polynucleotide and any other substance (e.g., one or more chemical agents, proteins, etc.) that can aid in the prevention and/or amelioration of β-hemolytic streptococcal colonization or infection. In yet another embodiment, the immunogenic compositions comprise a vector that comprises a polynucleotide of the invention. The immunogenic compositions of the invention can also include an effective amount of an adjuvant.

[0020] The invention also includes methods of protecting a susceptible mammal against β-hemolytic streptococcal colonization or infection. In one embodiment, the method comprises administering to a mammal an effective amount of an immunogenic composition comprising an immunogenic amount of a polypeptide of the invention, which amount is effective to prevent or ameliorate β-hemolytic streptococcal colonization or infection in the susceptible mammal. In another embodiment, the method comprises administering to the mammal an effective amount of an immunogenic composition comprising a polynucleotide of the invention, which amount is effective to prevent or ameliorate β-hemolytic streptococcal colonization or infection in the susceptible mammal. The immunogenic compositions of the invention can be administered by any conventional route, for example, by subcutaneous or intramuscular injection, oral ingestion, or intranasally.

[0021] The invention further includes compositions and methods for reducing at least one of the number and the growth of β-hemolytic streptococci in a mammal having a β-hemolytic streptococcal colonization or infection. In one embodiment, the composition comprises an antibody of the invention. In another embodiment, the composition comprises an antisense oligonucleotide capable of blocking expression of a nucleotide sequence encoding a polypeptide of the invention.

[0022] Also provided are methods for reducing side effects caused by β-hemolytic streptococcal infection in a mammal. In one embodiment, the method comprises administering to the mammal an effective amount of a composition comprising an antibody of the invention, which amount is effective to reduce at least one of the number of and the growth of β-hemolytic streptococci in the mammal. In another embodiment, the method comprises administering to the mammal an effective amount of a composition comprising an antisense oligonucleotide capable of blocking expression of a nucleotide sequence encoding a polypeptide of the invention, which amount is effective to reduce at least one of the number of and the growth of β-hemolytic streptococci in the mammal.

[0023] Also provided are methods for detecting and/or identifying β-hemolytic streptococci in a biological sample. In one embodiment, the method comprises (a) contacting the biological sample with a polynucleotide of the invention under conditions that permit hybridization of complementary base pairs and (b) detecting the presence of hybridization complexes in the sample, wherein the detection of hybridization complexes indicates the presence of β-hemolytic streptococci in the biological sample. In another embodiment, the method comprises (a) contacting the biological sample with an antibody of the invention under conditions suitable for the formation of immune complexes and (b) detecting the presence of immune complexes in the sample, wherein the detection of immune complexes indicates the presence of β-hemolytic streptococci in the biological sample. In yet another embodiment, the method comprises (a) contacting the biological sample with a polypeptide of the invention under conditions suitable for the formation of immune complexes and (b) detecting the presence of immune complexes in the sample, wherein the detection of immune complexes indicates the presence of antibodies to β-hemolytic streptococci in the biological sample.

[0024] The invention further provides immunogenic compositions. In one embodiment, the immunogenic composition comprises at least one polypeptide of the invention. In another embodiment, the immunogenic composition comprises at least one polynucleotide of the invention. In yet another embodiment, the immunogenic composition comprises at least one antibody of the invention.

[0025] Also provided is an isolated polynucleotide comprising a nucleotide sequence that has at least 70% identity to a nucleotide sequence that encodes a polypeptide of the invention, the polynucleotide being identified by the steps comprising (a) obtaining a first and second PCR primer derived from a nucleotide that encodes a mature polypeptide of any of SEQ ID NOS: 2-668, wherein the first and second primers are capable of initiating nucleic acid synthesis in an outward manner under PCR conditions, and wherein the first primer is capable of being extended in an antisense direction and the second primer is capable of being extended in a sense direction and (b) combining the first and second PCR primer with a cDNA library that contains the polynucleotide under PCR conditions suitable for synthesizing the nucleotide sequence from the first and second primers.

[0026] Also provided is a method for extending a polynucleotide of the invention using polymerase chain reaction (PCR), the method comprising the steps of (a) obtaining a first and second PCR primer derived from the polynucleotide, wherein the first and second PCR primers are capable of initiating nucleic acid synthesis in an outward manner under PCR conditions, and wherein the first PCR primer is capable of being extended in an antisense direction and the second PCR primer is capable of being extended in a sense direction and (b) combining the first and second PCR primers with the polynucleotide contained in a cDNA library under PCR conditions suitable for synthesizing nucleotide sequences from the first and second PCR primers, thereby extending the polynucleotide.

[0027] It is to be understood that the foregoing general description and the following detailed description are exemplary, but are not restrictive, of the invention.

### BRIEF DESCRIPTION OF THE DRAWINGS

[0028] FIG. 1 depicts a graphical representation of open reading frame (ORF) identification.

[0029] FIG. 2 depicts a low-voltage scanning electron micrograph (LV-SEM) of Streptococcus pyogenes after digestion with trypsin, wherein cell integrity is maintained and an even monolayer is present. The bar equals 1 μm.

[0030] FIG. 3 depicts a LV-SEM of Streptococcus pyogenes before and after digestion with trypsin. Panel A (the left panel) shows cells before tryptic digestion, wherein the cells are larger and display surface material. Panel B (the right panel) shows cells after digestion, wherein the cells are smaller and appear devoid of any surface proteins. The bars equal 1 μm.

[0031] FIG. 4 depicts a LV-SEM of Streptococcus pyogenes expressing protein encoded by ORE 218.

[0032] FIG. 5 depicts a LV-SEM of Streptococcus pyogenes expressing protein encoded by ORF 554.

[0033] FIG. 6 depicts a LV-SEM of Streptococcus pyogenes expressing protein encoded by ORF 1191.

[0034] FIG. 7 depicts a LV-SEM of Streptococcus pyogenes expressing protein encoded by ORF 2064.

[0035] FIG. 8 depicts a LV-SEM of Streptococcus pyogenes expressing protein encoded by ORF 2601.

[0036] FIG. 9 depicts a LV-SEM of Streptococcus pyogenes expressing protein encoded by ORF 1316.

[0037] FIG. 10 depicts a LV-SEM of Streptococcus pyogenes expressing protein encoded by ORF 1224.

[0038] FIG. 11 depicts PCR analysis of several Streptococcus pyogenes strains to illustrate gene conservation across the strains.

[0039] FIG. 12 depicts quantitative PCR analysis of selected Streptococcus pyogenes ORFs to demonstrate that all ORFs tested are transcribed in vitro and in vivo.

[0040] FIG. 13 depicts a dot blot showing reactivity of human serum with the ORF gene products.

[0041] FIG. 14 depicts ability of SPE I to induce rabbit splenocyte proliferation compared to other SPEs.

[0042] FIG. 15 depicts human T cell receptor stimulation profile induced by SPE I (black bars) compared to stimulation by anti CD3 antibodies (open bars).

### DETAILED DESCRIPTION OF THE INVENTION

[0043] The present invention provides compositions and methods to ameliorate and prevent infections caused by all β-hemolytic streptococci, including groups A, B, C and G. To identify polynucleotides and polypeptides useful for the amelioration and prevention of infections caused by β-hemolytic streptococci, two strategies, a genomic approach and a proteomic approach, were used to identify surface localized, Streptococcus pyogenes proteins.

[0044] The genomic approach included an extensive genomic analysis in silico of the Streptococcus pyogenes genome using several algorithms designed to identify and characterize genes that would encode surface localized proteins. The proteomic approach was undertaken to identify proteins present on the surface of Streptococcus pyogenes. Reliance on both approaches was important to overcome the deficiencies of each approach. Genomic mining provides the genetic capabilities, but gives little information as to the actual phenotypic expression. Conversely, proteomic analysis identifies actual proteins localized to the surface of the cell, but protein expression may be regulated and the specific conditions under which the bacterial cells are cultured may influence the set of proteins identified.

[0045] The results of the genomic and proteomic approaches were combined and the ORFs of interest were categorized into one of four groups: (i) ORFs encoding surface localized proteins identified by proteomics (Table L odd numbered SEQ ID NOS: 1-147); (ii) ORFs encoding putative lipoproteins (Table II, odd numbered SEQ ID NOS: 149-181, 669); (iii) ORFs encoding putative polypeptides containing a LPXTG motif (Table M, odd numbered SEQ ID NOS: 183-187); and (iv) ORFs encoding other putative surface localized polypeptides (Table IV, odd numbered SEQ ID NOS: 189-667). The ORFs-contained in Tables I-IV are non-redundant, i.e., the ORFs listed in Tables I-IV each appear once though many ORFs possess characteristics that match another table. Thus, for example, there are ORFs listed in Table I (ORFs encoding surface localized proteins identified by proteomics) that could also be classified in one or more of Tables II-IV, but are not included in those tables.

TABLE I

Open Reading Frames (ORFs) encoding surface
localized proteins identified by proteomics

| | |
|---|---|
| SEQ ID NO: 1 | (ORF 66) |
| SEQ ID NO: 3 | (ORF 102) |
| SEQ ID NO: 5 | (ORF 145) |
| SEQ ID NO: 7 | (ORF 232) |
| SEQ ID NO: 9 | (ORF 238) |
| SEQ ID NO: 11 | (ORF 436) |
| SEQ ID NO: 13 | (ORF 516) |
| SEQ ID NO: 15 | (ORF 554) |
| SEQ ID NO: 17 | (ORF 589) |
| SEQ ID NO: 19 | (ORF 661) |
| SEQ ID NO: 21 | (ORF 668) |
| SEQ ID NO: 23 | (ORF 678) |
| SEQ ID NO: 25 | (ORF 704) |
| SEQ ID NO: 27 | (ORF 743) |
| SEQ ID NO: 29 | (ORF 825) |
| SEQ ID NO: 31 | (ORF 850) |
| SEQ ID NO: 33 | (ORF 934) |
| SEQ ID NO: 35 | (ORF 993) |
| SEQ ID NO: 37 | (ORF 1036) |
| SEQ ID NO: 39 | (ORF 1140) |
| SEQ ID NO: 41 | (ORF 1157) |
| SEQ ID NO: 43 | (ORF 1191) |
| SEQ ID NO: 45 | (ORF 1218) |
| SEQ ID NO: 47 | (ORF 1224) |
| SEQ ID NO: 49 | (ORF 1234) |
| SEQ ID NO: 51 | (ORF 1237) |
| SEQ ID NO: 53 | (ORF 1238) |
| SEQ ID NO: 55 | (ORF 1253) |
| SEQ ID NO: 57 | (ORF 1284) |
| SEQ ID NO: 59 | (ORF 1316) |
| SEQ ID NO: 61 | (ORF 1330) |
| SEQ ID NO: 63 | (ORF 1358) |
| SEQ ID NO: 65 | (ORF 1487) |
| SEQ ID NO: 67 | (ORF 1495) |
| SEQ ID NO: 69 | (ORF 1557) |
| SEQ ID NO: 71 | (ORF 1638) |
| SEQ ID NO: 73 | (ORF 1650) |
| SEQ ID NO: 75 | (ORF 1654) |
| SEQ ID NO: 77 | (ORF 1659) |
| SEQ ID NO: 79 | (ORF 1698) |
| SEQ ID NO: 81 | (ORF 1788) |
| SEQ ID NO: 83 | (ORF 1794) |
| SEQ ID NO: 85 | (ORF 1816) |
| SEQ ID NO: 87 | (ORF 1818) |
| SEQ ID NO: 89 | (ORF 1819) |
| SEQ ID NO: 91 | (ORF 1850) |
| SEQ ID NO: 93 | (ORF 1854) |
| SEQ ID NO: 95 | (ORF 1878) |
| SEQ ID NO: 97 | (ORF 1902) |
| SEQ ID NO: 99 | (ORF 1943) |
| SEQ ID NO: 101 | (ORF 1975) |
| SEQ ID NO: 103 | (ORF 2019) |
| SEQ ID NO: 105 | (ORF 2064) |
| SEQ ID NO: 107 | (ORF 2086) |
| SEQ ID NO: 109 | (ORF 2106) |
| SEQ ID NO: 111 | (ORF 2116) |
| SEQ ID NO: 113 | (ORF 2120) |
| SEQ ID NO: 115 | (ORF 2123) |
| SEQ ID NO: 117 | (ORF 2202) |
| SEQ ID NO: 119 | (ORF 2214) |
| SEQ ID NO: 121 | (ORF 2330) |
| SEQ ID NO: 123 | (ORF 2354) |
| SEQ ID NO: 125 | (ORF 2377) |
| SEQ ID NO: 127 | (ORF 2379) |
| SEQ ID NO: 129 | (ORF 2387) |
| SEQ ID NO: 131 | (ORF 2417) |
| SEQ ID NO: 133 | (ORF 2420) |
| SEQ ID NO: 135 | (ORF 2422) |
| SEQ ID NO: 137 | (ORF 2450) |
| SEQ ID NO: 139 | (ORF 2459) |
| SEQ ID NO: 141 | (ORF 2477) |
| SEQ ID NO: 143 | (ORF 2586) |
| SEQ ID NO: 145 | (ORF 2593) |
| SEQ ID NO: 147 | (ORF 2601) |

[0046] TABLE II
Open Reading Frames (ORFs) encoding putative lipoproteins

SEQ ID NO: 149 (ORF 68)
SEQ ID NO: 151 (ORF 309)
SEQ ID NO: 153 (ORF 347)
SEQ ID NO: 155 (ORF 540)
SEQ ID NO: 157 (ORF 601)
SEQ ID NO: 159 (ORF 664)
SEQ ID NO: 161 (ORF 685)
SEQ ID NO: 163 (ORF 729)
SEQ ID NO: 165 (ORF 747)
SEQ ID NO: 167 (ORF 1202)
SEQ ID NO: 169 (ORF 1723)
SEQ ID NO: 171 (ORF 1755)
SEQ ID NO: 173 (ORF 1789)
SEQ ID NO: 175 (ORF 1882)
SEQ ID NO: 177 (ORF 1918)
SEQ ID NO: 179 (ORF 1983)
SEQ ID NO: 181 (ORF 2452)
SEQ ID NO: 669 (ORF 1664)

[0047] TABLE III

Open Reading Frames (ORFs) encoding putative
polypeptides containing a LPXTG motif

SEQ ID NO: 183 (ORF 433)
SEQ ID NO: 185 (ORF 967)
SEQ ID NO: 187 (ORF 2497)

[0048] TABLE IV

Open Reading Frames (ORFs) encoding other
putative surface localized polypeptides

SEQ ID NO: 189 (ORF 4)
SEQ ID NO: 191 (ORF 5)
SEQ ID NO: 193 (ORF 11)
SEQ ID NO: 195 (ORF 17)
SEQ ID NO: 197 (ORF 18)
SEQ ID NO: 199 (ORF 20)
SEQ ID NO: 201 (ORF 25)
SEQ ID NO: 203 (ORF 49)
SEQ ID NO: 205 (ORF 64)
SEQ ID NO: 207 (ORF 65)
SEQ ID NO: 209 (ORF 67)
SEQ ID NO: 211 (ORF 69)
SEQ ID NO: 213 (ORF 72)
SEQ ID NO: 215 (ORF 73)
SEQ ID NO: 217 (ORF 75)
SEQ ID NO: 219 (ORF 98)
SEQ ID NO: 221 (ORF 99)
SEQ ID NO: 223 (ORF 130)
SEQ ID NO: 225 (ORF 133)
SEQ ID NO: 227 (ORF 141)
SEQ ID NO: 229 (ORF 151)
SEQ ID NO: 231 (ORF 165)
SEQ ID NO: 233 (ORF 172)
SEQ ID NO: 235 (ORF 184)
SEQ ID NO: 237 (ORF 189)
SEQ ID NO: 239 (ORF 199)
SEQ ID NO: 241 (ORF 209)
SEQ ID NO: 243 (ORF 218)
SEQ ID NO: 245 (ORF 220)
SEQ ID NO: 247 (ORF 223)
SEQ ID NO: 249 (ORF 227)
SEQ ID NO: 251 (ORF 241)
SEQ ID NO: 253 (ORF 252)
SEQ ID NO: 255 (ORF 264)
SEQ ID NO: 257 (ORF 265)
SEQ ID NO: 259 (ORF 291)
SEQ ID NO: 261 (ORF 292)
SEQ ID NO: 263 (ORF 306)
SEQ ID NO: 265 (ORF 307)
SEQ ID NO: 267 (ORF 313)
SEQ ID NO: 269 (ORF 350)
SEQ ID NO: 271 (ORF 352)
SEQ ID NO: 273 (ORF 353)
SEQ ID NO: 275 (ORF 368)
SEQ ID NO: 277 (ORF 401)
SEQ ID NO: 279 (ORF 405)
SEQ ID NO: 281 (ORF 421)
SEQ ID NO: 283 (ORF 491)
SEQ ID NO: 285 (ORF 510)
SEQ ID NO: 287 (ORF 511)
SEQ ID NO: 289 (ORF 519)
SEQ ID NO: 291 (ORF 523)
SEQ ID NO: 293 (ORF 535)
SEQ ID NO: 295 (ORF 551)
SEQ ID NO: 297 (ORF 567)
SEQ ID NO: 299 (ORF 570)
SEQ ID NO: 301 (ORF 594)
SEQ ID NO: 303 (ORF 597)
SEQ ID NO: 305 (ORF 602)
SEQ ID NO: 307 (ORF 613)
SEQ ID NO: 309 (ORF 627)
SEQ ID NO: 311 (ORF 639)
SEQ ID NO: 313 (ORF 644)
SEQ ID NO: 315 (ORF 650)
SEQ ID NO: 317 (ORF 653)
SEQ ID NO: 319 (ORF 665)
SEQ ID NO: 321 (ORF 670)
SEQ ID NO: 323 (ORF 671)
SEQ ID NO: 325 (ORF 672)
SEQ ID NO: 327 (ORF 674)
SEQ ID NO: 329 (ORF 676)
SEQ ID NO: 331 (ORF 688)
SEQ ID NO: 333 (ORF 699)
SEQ ID NO: 335 (ORF 702)
SEQ ID NO: 337 (ORF 705)
SEQ ID NO: 339 (ORF 706)
SEQ ID NO: 341 (ORF 721)
SEQ ID NO: 343 (ORF 731)
SEQ ID NO: 345 (ORF 733)
SEQ ID NO: 347 (ORF 737)
SEQ ID NO: 349 (ORF 741)
SEQ ID NO: 351 (ORF 754)
SEQ ID NO: 353 (ORF 774)
SEQ ID NO: 355 (ORF 783)
SEQ ID NO: 357 (ORF 788)
SEQ ID NO: 359 (ORF 805)
SEQ ID NO: 361 (ORF 814)
SEQ ID NO: 363 (ORF 818)
SEQ ID NO: 365 (ORF 844)
SEQ ID NO: 367 (ORF 848)
SEQ ID NO: 369 (ORF 858)
SEQ ID NO: 371 (ORF 859)
SEQ ID NO: 373 (ORF 860)
SEQ ID NO: 375 (ORF 871)
SEQ ID NO: 377 (ORF 877)
SEQ ID NO: 379 (ORF 896)
SEQ ID NO: 381 (ORF 908)
SEQ ID NO: 383 (ORF 909)
SEQ ID NO: 385 (ORF 910)
SEQ ID NO: 387 (ORF 920)
SEQ ID NO: 389 (ORF 921)
SEQ ID NO: 391 (ORF 926)
SEQ ID NO: 393 (ORF 928)
SEQ ID NO: 395 (ORF 929)
SEQ ID NO: 397 (ORF 933)
SEQ ID NO: 399 (ORF 952)
SEQ ID NO: 401 (ORF 961)
SEQ ID NO: 403 (ORF 975)
SEQ ID NO: 405 (ORF 983)
SEQ ID NO: 407 (ORF 991)
SEQ ID NO: 409 (ORF 1015)
SEQ ID NO: 411 (ORF 1018)
SEQ ID NO: 413 (ORF 1020)
SEQ ID NO: 415 (ORF 1021)
SEQ ID NO: 417 (ORF 1026)
SEQ ID NO: 419 (ORF 1058)
SEQ ID NO: 421 (ORF 1110)
SEQ ID NO: 423 (ORF 1132)
SEQ ID NO: 425 (ORF 1152)
SEQ ID NO: 427 (ORF 1156)
SEQ ID NO: 429 (ORF 1188)
SEQ ID NO: 431 (ORF 1200)
SEQ ID NO: 433 (ORF 1203)
SEQ ID NO: 435 (ORF 1205)
SEQ ID NO: 437 (ORF 1210)
SEQ ID NO: 439 (ORF 1216)
SEQ ID NO: 441 (ORF 1228)
SEQ ID NO: 443 (ORF 1231)
SEQ ID NO: 445 (ORF 1265)
SEQ ID NO: 447 (ORF 1267)
SEQ ID NO: 449 (ORF 1269)
SEQ ID NO: 451 (ORF 1272)
SEQ ID NO: 453 (ORF 1275)
SEQ ID NO: 455 (ORF 1292)
SEQ ID NO: 457 (ORF 1300)
SEQ ID NO: 459 (ORF 1310)
SEQ ID NO: 461 (ORF 1311)
SEQ ID NO: 463 (ORF 1318)
SEQ ID NO: 465 (ORF 1321)
SEQ ID NO: 467 (ORF 1362)
SEQ ID NO: 469 (ORF 1395)
SEQ ID NO: 471 (ORF 1497)
SEQ ID NO: 473 (ORF 1500)
SEQ ID NO: 475 (ORF 1512)
SEQ ID NO: 477 (ORF 1513)
SEQ ID NO: 479 (ORF 1525)
SEQ ID NO: 481 (ORF 1527)
SEQ ID NO: 483 (ORF 1548)
SEQ ID NO: 485 (ORF 1573)
SEQ ID NO: 487 (ORF 1585)
SEQ ID NO: 489 (ORF 1586)
SEQ ID NO: 491 (ORF 1593)
SEQ ID NO: 493 (ORF 1608)
SEQ ID NO: 495 (ORF 1661)
SEQ ID NO: 497 (ORF 1667)
SEQ ID NO: 499 (ORF 1671)
SEQ ID NO: 501 (ORF 1672)
SEQ ID NO: 503 (ORF 1678)
SEQ ID NO: 505 (ORF 1680)
SEQ ID NO: 507 (ORF 1681)
SEQ ID NO: 509 (ORF 1682)
SEQ ID NO: 511 (ORF 1683)
SEQ ID NO: 513 (ORF 1720)
SEQ ID NO: 515 (ORF 1725)
SEQ ID NO: 517 (ORF 1726)
SEQ ID NO: 519 (ORF 1732)
SEQ ID NO: 521 (ORF 1736)
SEQ ID NO: 523 (ORF 1771)
SEQ ID NO: 525 (ORF 1772)
SEQ ID NO: 527 (ORF 1775)
SEQ ID NO: 529 (ORF 1776)
SEQ ID NO: 531 (ORF 1777)
SEQ ID NO: 533 (ORF 1783)
SEQ ID NO: 535 (ORF 1785)
SEQ ID NO: 537 (ORF 1786)
SEQ ID NO: 539 (ORF 1814)
SEQ ID NO: 541 (ORF 1820)
SEQ ID NO: 543 (ORF 1828)
SEQ ID NO: 545 (ORF 1833)
SEQ ID NO: 547 (ORF 1834)
SEQ ID NO: 549 (ORF 1839)
SEQ ID NO: 551 (ORF 1873)
SEQ ID NO: 553 (ORF 1875)
SEQ ID NO: 555 (ORF 1876)
SEQ ID NO: 557 (ORF 1888)
SEQ ID NO: 559 (ORF 1909)
SEQ ID NO: 561 (ORF 1917)
SEQ ID NO: 563 (ORF 1931)
SEQ ID NO: 565 (ORF 1970)
SEQ ID NO: 567 (ORF 1972)
SEQ ID NO: 569 (ORF 1979)
SEQ ID NO: 571 (ORF 1987)
SEQ ID NO: 573 (ORF 1993)
SEQ ID NO: 575 (ORF 2013)
SEQ ID NO: 577 (ORF 2014)
SEQ ID NO: 579 (ORF 2015)
SEQ ID NO: 581 (ORF 2020)
SEQ ID NO: 583 (ORF 2023)
SEQ ID NO: 585 (ORF 2046)
SEQ ID NO: 587 (ORF 2048)
SEQ ID NO: 589 (ORF 2050)
SEQ ID NO: 591 (ORF 2069)
SEQ ID NO: 593 (ORF 2070)
SEQ ID NO: 595 (ORF 2091)
SEQ ID NO: 597 (ORF 2148)
SEQ ID NO: 599 (ORF 2170)
SEQ ID NO: 601 (ORF 2201)
SEQ ID NO: 603 (ORF 2222)
SEQ ID NO: 605 (ORF 2231)
SEQ ID NO: 607 (ORF 2236)
SEQ ID NO: 609 (ORF 2240)
SEQ ID NO: 611 (ORF 2245)
SEQ ID NO: 613 (ORF 2247)
SEQ ID NO: 615 (ORF 2250)
SEQ ID NO: 617 (ORF 2258)
SEQ ID NO: 619 (ORF 2266)
SEQ ID NO: 621 (ORF 2273)
SEQ ID NO: 623 (ORF 2289)
SEQ ID NO: 625 (ORF 2291)
SEQ ID NO: 627 (ORF 2300)
SEQ ID NO: 629 (ORF 2319)
SEQ ID NO: 631 (ORF 2342)
SEQ ID NO: 633 (ORF 2391)
SEQ ID NO: 635 (ORF 2398)
SEQ ID NO: 637 (ORF 2399)
SEQ ID NO: 639 (ORF 2411)
SEQ ID NO: 641 (ORF 2414)
SEQ ID NO: 643 (ORF 2428)
SEQ ID NO: 645 (ORF 2429)
SEQ ID NO: 647 (ORF 2437)
SEQ ID NO: 649 (ORF 2457)
SEQ ID NO: 651 (ORF 2458)
SEQ ID NO: 653 (ORF 2473)
SEQ ID NO: 655 (ORF 2482)
SEQ ID NO: 657 (ORF 2488)
SEQ ID NO: 659 (ORF 2508)
SEQ ID NO: 661 (ORF 2521)
SEQ ID NO: 663 (ORF 2534)
SEQ ID NO: 665 (ORF 2562)
SEQ ID NO: 667 (ORF 2583)

[0049] Genomic Approach

[0050] The availability of complete bacterial genome sequences is currently playing an important role in the identification of immunogenic composition candidates through genomics, transcriptional profiling, and proteomics, coupled with the information processing capabilities of bioinformatics (39-41, 53, 60, 65).

[0051] The genomic approach began by identifying open reading frames (ORFs) in an unannotated sequence of Streptococcus pyogenes downloaded from the website of the University of Oklahoma This genomic sequence was reported as being submitted to GenBank and assigned accession number AE004092. Strain M1 GAS was reported as being submitted to the ATCC and given accession number ATCC 700294.

[0052] An ORF is defined herein as having one of three potential start site codons, ATG, GTG, or TTG, and one of three potential stop codons, TAA, TAG, or TGA. Using this definition of an ORF, the Streptococcus pyogenes genome was analyzed to identify ORFs using three ORF finder algorithms, GLIMMER (59), GeneMark (34), and an algorithm developed by inventor's assignee. There were 736 ORFs commonly identified by all three algorithms. The difference in results between the different ORF finders is primarily due to the particular start codons used by each program, however, Glimmer also incorporates some evaluation for a Shine-Dalgarno box. All ORFs with common stop codons were given the same ORF designation and were treated as if they were the same ORF.

[0053] In order to evaluate the accuracy of the ORFs determined, a discrete mathematical cosine function, known in the art as a discrete cosine transformation (DiCTion), was employed to assign a score for each ORF. An ORF with a DiCTion score >1.5 was considered to have a high probability of encoding a protein product. The minimum length of an ORF predicted by the three ORF finding algorithms was set to 225 nucleotides (including stop codon) which would encode a protein of 74 amino acids.

[0054] As a final search for remnants of ORFs, all noncoding regions >75 nucleotides were searched against public protein databases using tBLASTn to identify regions of genes that contained frameshifts (42) or fragments of genes that might have a role in causing antigenic variation (21). These remnant ORFs were added to the ORF hits.

[0055] A graphical analysis program developed by inventor's assignee was used to show all six reading frames and the location of the predicted ORFs relative to the genomic sequence. This helped to eliminate ORFs that had large overlaps with other ORFs, although there are known cases of ORFs being totally embedded within other ORFs (25, 33).

[0056] The initial annotation of these Streptococcus pyogenes ORFs was performed using the BLAST v. 2.0 Gapped search algorithm, BLASTp, to identify homologous sequences. A cutoff “e” value of anything <e⁻¹⁰ was considered significant. Other search algorithms, including FASTA and PSI-BLAST, were also used. The non-redundant protein sequence databases used for the homology searches included GenBank, SWISS-PROT, PIR, and TREMBL database sequences updated daily. ORFs with a BLASTp result of >e⁻¹⁰ were considered to be unique to Streptococcus pyogenes.

[0057] Currently, about 60% of all ORFs within a bacterial genome have some match with a protein whose function has been determined. That leaves about 40% of genomic ORFs still uncharacterized. A keyword search of the entire Blast results was carried out using known or suspected candidate target genes as well as words that identified the location of a protein or function. In addition, a keyword search was performed of all MEDLINE references associated with the initial Blast results to look for additional information regarding the ORFs. The keyword search included, for example, the following search terms: adhesin(ion); fibronectin; fibrinogen; collagen; transporter; exporter; extracellular; transferase; surface; and binding. Blast analysis of the ORFs resulted in 1005 ORFS listed as unclassified, 284 ORFs appeared to be specific to Streptococcus pyogenes since they produced Blast similarity only with proteins from this organism, and 676 ORFs were associated with a Medline reference.

[0058] For DNA analysis, the % G+C content within each gene was identified. The % G+C content of an ORF was calculated as the (G+C) content of the third nucleotide position of all the codons within an ORF. The value reported was the difference of this value from the arithmetic mean of such values obtained for all ORFs found in the organism. An absolute value >8 was considered important for further analysis, as these ORFs may have arisen from horizontal transfer as has been shown in the case of cag pathogenicity island from H. pylori (2), a pattern in keeping with many other pathogenicity islands (22). ORFs that were significantly different in their G+C content totaled 289. These ORFs were further examined for similarity to virulence factors acquired from another organism by horizontal transfer.

[0059] Several parameters were used to determine partitioning of the predicted proteins. Proteins destined for translocation across the cytoplasmic membrane encode a leader signal (also known as a signal sequence) composed of a central hydrophobic region flanked at the N-terminus by positively charged residues (56). The program SignalP was used to identify signal peptides and their cleavage sites (46). During expression, the signal peptide is cleaved to produce a mature peptide. In addition, to predict protein localization in bacteria, the software PSORT was used (44). PSORT uses a neural net algorithm to predict localization of proteins to the cytoplasm, periplasm, and/or cytoplasmic membrane for Gram-positive bacteria as well as outer membrane for Gram-negative bacteria. PSORT identified 40 ORFs predicted to be surface exposed (Table V).

TABLE V
Open Reading Frames (ORFs) encoding putative
extracellular proteins

| | | | | | | |
|---|---|---|---|---|---|---|
| 68 | 705 | 1202 | 1664 | 1723 | 2020 | 2385 |
| 165 | 729 | 1310 | 1667 | 1777 | 2046 | 2414 |
| 252 | 788 | 1358 | 1678 | 1909 | 2170 | 2437 |
| 510 | 1058 | 1362 | 1680 | 1972 | 2236 | 2601 |
| 601 | 1132 | 1573 | 1681 | 1975 | 2250 | |
| 668 | 1200 | 1638 | 1683 | 2014 | 2300 | |

[0060] In addition, transmembrane (TM) domains of proteins were analyzed using the software program TopPred2 (10). This program predicts regions of a protein that are hydrophobic that may potentially span the lipid bilayer of the membrane. Analysis by TopPred2 for hydrophobic regions of a protein that may potentially span the lipid bilayer of the membrane identified 48 ORFs that encoded putative proteins with three or more transmembrane spanning domains (Table VI) and are thus considered to be membrane bound.

TABLE VI
Open Reading Frames (ORFs) encoding putative proteins
with three or greater transmembrane regions

| | | | | | | |
|---|---|---|---|---|---|---|
| 8 | 307 | 594 | 752 | 1222 | 1598 | 2069 |
| 73 | 312 | 613 | 844 | 1266 | 1657 | 2091 |
| 80 | 395 | 650 | 925 | 1317 | 1708 | 2227 |
| 95 | 508 | 672 | 975 | 1488 | 1726 | 2283 |
| 141 | 551 | 706 | 1018 | 1496 | 1779 | 2424 |
| 265 | 567 | 708 | 1152 | 1513 | 1999 | 2562 |
| 306 | 593 | 731 | 1156 | 1596 | 2002 | |

[0061] The Hidden Markov Model (HMM) Pfam database of multiple alignments of protein domains or conserved protein regions (61) was used to identify Streptococcus pyogenes proteins that may belong to an existing protein family. Keyword searching of this output was used to identify proteins that might have been missed by the Blast search criteria. HMM models were also developed by inventor's assignee. A computer algorithm, HMM Lipo, was developed to predict lipoproteins using 132 biologically characterized non-Streptococcus pyogenes bacterial lipoproteins from over 30 organisms. This training set was generated from experimentally proven prokaryotic lipoproteins. HMM Lipo identified 30 ORFs that are putative lipoproteins (Table VII).

TABLE VII
Open Reading Frames (ORFs) encoding putative lipoproteins

| | | | | | |
|---|---|---|---|---|---|
| 68 | 601 | 747 | 1659 | 1789 | 1983 |
| 309 | 678 | 1157 | 1664 | 1818 | 2417 |
| 347 | 685 | 1202 | 1723 | 1878 | 2452 |
| 540 | 704 | 1284 | 1755 | 1882 | 2459 |
| 554 | 729 | 1495 | 1788 | 1918 | 2601 |

[0062] In addition, 15 ORFs were predicted to have a LPXTG motif and were classified as proteins that might be targeted by sortase (Table VI).

TABLE VIII
Open Reading Frames (ORFs) encoding putative proteins
containing the LPXTG motif

| | | | |
|---|---|---|---|
| 433 | 1218 | 1854 | 2450 |
| 608 | 1316 | 2019 | 2477 |
| 967 | 1330 | 2434 | 2497 |
| 1191 | 1698 | 2446 | |

[0063] SEQ ID NOS: 669-674 contain the nucleotide and amino acid sequences of the proteins Grab (ORF 608), M protein (ORF 2434), and ScpA (ORF 2446), respectively.

[0064] Furthermore, using about 70 known prokaryotic proteins containing the LPXTG cell wall sorting signal, a HMM (15) was developed to predict cell wall proteins that are anchored to the peptidoglycan layer (38, 45). The model used not only the LPXTG sequence, but also included two features of the downstream sequence, the hydrophobic transmembrane domain and the positively charged carboxy terminus. There were 5 proteins identified as potentially binding to the peptidoglycan layer in a non-covalent manner independently of the sortase (Table IX).

TABLE IX
Open Reading Frames (ORFs) encoding putative
peptidoglycan binding proteins

| | | | | |
|---|---|---|---|---|
| 898 | 1569 | 1675 | 2266 | 2311 |

[0065] The proteins encoded by the identified ORFs were also evaluated for other characteristics. A tandem repeat finder (5) identified ORFs containing repeated DNA sequences such as those found in MSCRAMMs (20) and phase variable surface proteins of Neisseria meiningitidis (51). There were 23 ORFs found to encode proteins containing such repeat regions (Table X).

TABLE X
Open Reading Frames (ORFs) encoding putative proteins
containing repeat regions

| | | | | | |
|---|---|---|---|---|---|
| 218 | 433 | 1149 | 1783 | 2422 | 2513 |
| 265 | 555 | 1562 | 1972 | 2434 | 2590 |
| 336 | 699 | 1583 | 2137 | 2437 | 2618 |
| 431 | 783 | 1683 | 2231 | 2477 | |

[0066] In addition, proteins that contain the Arg-Gly-Asp (RGD) attachment motif, together with integrins that serve as their receptor, constitute a major recognition system for cell adhesion. RGD recognition is one mechanism used by microbes to gain entry into eukaryotic tissues (29, 63). There were 65 ORFs identified that encoded RGD-containing proteins (Table XI).

TABLE XI
Open Reading Frames (ORFs) encoding putative proteins
containing the RGD motif.

| | | | | | | |
|---|---|---|---|---|---|---|
| 18 | 544 | 885 | 1149 | 1504 | 1957 | 2379 |
| 201 | 626 | 889 | 1161 | 1626 | 2042 | 2414 |
| 209 | 641 | 899 | 1200 | 1643 | 2054 | 2446 |
| 302 | 654 | 967 | 1274 | 1657 | 2082 | 2558 |
| 344 | 667 | 968 | 1313 | 1675 | 2148 | 2570 |
| 350 | 668 | 1010 | 1316 | 1773 | 2205 | |
| 396 | 695 | 1027 | 1373 | 1779 | 2247 | |
| 397 | 726 | 1074 | 1401 | 1885 | 2253 | |
| 413 | 787 | 1108 | 1416 | 1891 | 2287 | |
| 526 | 829 | 1110 | 1431 | 1901 | 2335 | |

[0067] A graphical representation of the results of the genomic analysis and ORF identification is depicted in FIG. 1.

[0068] Proteomic Approach

[0069] As stated above, a proteomic approach was also taken to identify surface localized proteins of Streptococcus pyogenes.

[0070] In order to identify only those proteins localized to the surface of the cell, care was taken during the preparation and digestion of the Streptococcus pyogenes cells with trypsin. Samples of the cells were taken just prior to the addition of trypsin and at the completion of the digestion, and were examined for cell integrity by viable counts and LV-SEM. Following digestion, untreated cells clearly aggregated and adhered to the side of the tube, while the treated cells formed an even cell suspension. Viable counts showed no significant difference between samples and in fact were slightly higher in the treated cells due to the aggregation of the untreated sample. LV-SEM confirmed these results (FIG. 2). Digested cells were evenly and individually distributed over the cover slip, while the untreated sample displayed large clumps of bacteria Topographical examination at high magnification of untreated bacterial cells displayed large quantities of surface material typical of Streptococcus pyogenes. However, individual cells in the trypsin digested sample showed the reduction of all observable surface protein as the cells appeared bald and devoid of any surface material. FIG. 3 depicts LV-SEMS of Streptococcus pyogenes before (left panel, Panel A) and after (right panel, Panel B) digestion with trypsin. The cells before digestion with trypsin (Panel A) are larger and display surface material. The LV-SEM of the cells after digestion (Panel B) are smaller and appear devoid of any surface protein.

[0071] In order to identify the peptide components of the complex surface digest mixture, an analytical technique was used to separate and sequence multiple peptides with high sensitivity over a large concentration range. Tandem mass spectrometry (MS/MS) has been shown to be a powerful approach to analyze proteins from both gels and in solution (17). MS/MS first uses a mass analyzer to separate a peptide ion from a mixture of ions, then uses a second step or mass analyzer to activate and dissociate the ion of interest. This process, known as collision induced dissociation (CID), causes the peptide to fragment at the peptide bonds between the amino acids, and therefore, the fragmentation pattern of a peptide is used to determine its amino acid sequence.

[0072] In addition, the SEQUEST computer algorithm was used to search the experimental fragmentation spectrum directly against protein or translated nucleotide sequence databases. For peptides above roughly 800-900 Da in size, a single spectrum can uniquely identify a protein.

[0073] To sequence multiple peptides from a complex mixture, a reversed phase chromatography system was coupled to an electrospray ion trap mass spectrometer. In this system, it is known that high sensitivity (down to sub-femtomole levels) can be attained by minimizing both flow rate and column diameter to concentrate the elution volume and direct as much of the column effluent as possible into the orifice of the mass spectrometer detector. Initial experiments separated peptides using a reversed phase gradient of 1% acetonitrile/min. In order to increase chromatographic separation, longer gradients, down to 0.28%-acetonitrile/min., and slower flow rates (50 nL/min.) were later employed. To maximize the coverage of proteins present in the sample, the data-dependent acquisition feature of the ion trap was employed.

[0074] Dynamic exclusion was used to prevent reacquisition of tandem mass spectra of ions once a spectrum had been acquired for a particular m/z value. The isotopic exclusion function excluded the ion associated with the ¹³C isotope of peptides from the list of ions slated for MS/MS. A 3-u mass width window was selected for this purpose. Using these data-dependent features dramatically increased the number of peptide ions that were selected for CID analysis.

[0075] The LC-MS/MS data acquisition conditions described above typically resulted in fragmentation data for more than 2000 peptide ions for each run. Using the SEQUEST algorithm, this data was searched against a composite protein sequence database containing the translated ORFs from Streptococcus pyogenes combined with the non-redundant protein sequence database OWL. SEQUEST search conditions used modified trypsin selectivity and allowed a differential search of +16 Da on methionine to account for methionine oxidation. Candidate matches identified by SEQUEST were confirmed using the following manual procedure. Those matches with Xcorr values greater than 2.5 (a measure of the similarity of the experimental ms/ms data to that generated from the sequence database) and delCn values greater than 0.1 (delCn measures the normalized difference between the Xcorr values of the first and second matches) were chosen for further analysis. The fragmentation spectra from good matches were checked for reasonable signal/noise, and the list of matched ions was examined for reasonable continuity. Some matches that were not acceptable alone were included if other confirmatory ms/ms data was generated by the same sample. The ORFs obtained by this proteomic approach are presented in Table XII.

TABLE XII
Open Reading Frames (ORFs) identified by tryptic digestion

| | | | | | | |
|---|---|---|---|---|---|---|
| 66 | 678 | 1224 | 1638 | 1878 | 2214 | 2459 |
| 102 | 704 | 1234 | 1650 | 1902 | 2330 | 2477 |
| 145 | 743 | 1237 | 1654 | 1943 | 2354 | 2586 |
| 232 | 825 | 1238 | 1659 | 1975 | 2377 | 2593 |
| 238 | 850 | 1253 | 1698 | 2019 | 2379 | 2601 |
| 436 | 934 | 1284 | 1788 | 2064 | 2387 | |
| 516 | 993 | 1316 | 1794 | 2086 | 2417 | |
| 554 | 1036 | 1330 | 1816 | 2106 | 2420 | |
| 589 | 1140 | 1358 | 1818 | 2116 | 2422 | |
| 608 | 1157 | 1487 | 1819 | 2120 | 2434 | |
| 661 | 1191 | 1495 | 1850 | 2123 | 2446 | |
| 668 | 1218 | 1557 | 1854 | 2202 | 2450 | |

[0076] Several of the ORFs identified were cloned and expressed. Mouse antisera, generated to the purified proteins, were first analyzed for reactivity by ELISA using the same preparation used for the mouse immunization as the coating antigen. To quantitate protein expression on the surface of Streptococcus pyogenes, these sera were then used in whole cell ELISAs. To qualify the protein expression of the specific proteins, whole Streptococcus pyogenes cells were labeled by immunogold and viewed by LV-SEM.

[0077] For some of the identified ORFs, the encoded proteins were observed to be expressed in a manner that was dependent upon phase of growth (mid-log versus stationary). Examples of this class are ORF 218 (FIG. 4), ORF 554 (FIG. 5), and ORF 1191 (FIG. 6). In some cases, expression level was higher in the mid-log growth, while others were greater in the stationary cells. Proteins encoded by other ORFs were expressed at low levels regardless of growth phase (ORFs 2064, 2601, and 1316) (shown in FIGS. 7-9, respectively), while others were expressed at high levels independent of growth phase (ORF 1224) (FIG. 10). As a positive control, anti-C5a peptidase sera was used as it is known to be expressed and localized to the cell wall of Streptococcus pyogenes. All antisera showed an increase in reactivity over the respective pre-immune control sera.

[0078] Combination of Genomic and Proteomic Approaches

[0079] The ORFs identified in Tables V-XII were then categorized into one of four groups: ORFs encoding surface localized proteins identified by proteomics (Table I); ORFs encoding putative lipoproteins (Table II); ORFs encoding putative polypeptides containing a LPXTG motif (Table III); and ORFs encoding other putative surface localized polypeptides (Table IV). Tables I-IV are provided supra It should be apparent that the ORFs contained in Tables I-IV are non-redundant, i.e., the ORFs listed in Tables I-IV each appear once though many possess characteristics that match another table.

[0080] The nucleotide sequences of Table I encode polypeptides that have been identified by the proteomic approach as being surface localized, Streptococcus pyogenes proteins. The nucleotide sequences of Tables II-IV encode putative polypeptides that have been identified by the described genomic approaches as being surface localized, Streptococcus pyogenes proteins. Specifically, the nucleotide sequences of Table II encode putative lipoproteins, the nucleotide sequences of Table m encode putative proteins having an LPXTG cell wall sorting signal, and the nucleotide sequences of Table IV encode putative surface localized proteins that include at least one of several criteria, as described herein, including similarity to other proteins for which a function and cellular location had been previously identified, match with a protein family (e.g., Pfam), and a combined analysis of the membrane spanning domains, Psort and sigP values, and the predicted molecular weight of the protein.

[0081] Each of odd numbered SEQ ID NOS: 1-667 encodes an amino acid sequence that is numbered consecutively after the nucleotide sequence. Thus, for example, the nucleotide sequence of SEQ ID NO: 1 encodes the amino acid sequence of SEQ ID NO: 2, and the nucleotide sequence of SEQ ID NO: 3 encodes the amino acid sequence of SEQ ID NO: 4, etc.

[0082] Polypeptides

[0083] The invention provides Streptococcus pyogenes polypeptides that are surface localized. Specifically, the polypeptides of the invention include isolated polypeptides that comprise an amino acid sequence of any of even numbered SEQ ID NOS: 2-668, i.e., SEQ ID NO: 2, 4, 6, 8, 10, 12, 14, 16, 18, 20, 22, 24, 26, 26, 30, 32, 34, 36, 38, 40, 42, 44, 46, 48, 50, 52, 54, 56, 58, 60, 62, 64, 66, 68, 70, 72; 74, 76, 78, 80, 82, 84, 86, 88, 90, 92, 94, 96, 98, 100, 102, 104, 106, 108, 110, 112, 114, 116, 118, 120; 122, 124, 126, 128, 130, 132, 134, 136; 138, 140, 142, 144, 146, 148, 150, 152, 154, 156, 158, 160, 162, 164, 166, 168, 170, 172, 174, 176, 178, 180, 182, 184, 186, 188, 190, 192, 194, 196, 198, 200, 202,204, 206, 208, 210, 212, 214, 216, 218, 220, 222, 224, 226, 228, 230, 232, 234, 236, 238, 240, 242, 244, 246, 248, 250, 252, 254, 256, 258, 260, 262, 264, 266, 268, 270, 272, 274, 276, 278, 280, 282, 284, 286, 288, 290, 292, 294, 296, 298, 300, 302, 304, 306, 308, 310, 312, 314, 316, 318, 320, 322, 324, 326, 328, 330, 332, 334, 336, 338, 340, 342, 344, 346, 348, 350, 352, 354, 356, 358, 360, 362, 364, 366, 368, 370, 372, 374, 376, 378, 380, 382, 384, 386, 388, 390, 392, 394, 396, 398, 400, 402, 404, 406, 408, 410, 412, 414, 416, 418, 420, 422, 424, 426, 428, 430, 432, 434, 436, 438, 440, 442, 444, 446, 448, 450, 452, 454, 456, 458, 460, 462, 464, 466, 468, 470, 472, 474, 476, 478, 480, 482, 484, 486, 488, 490, 492, 494, 496, 498, 500, 502, 504, 506, 508, 510, 512, 514, 516, 518, 520, 522, 524, 526, 528, 530, 532, 534, 536, 538, 540, 542, 544, 546, 548, 550, 552, 554, 556, 558, 560, 562, 564, 566, 568, 570, 572, 574, 576, 578, 580, 582, 584, 586, 588, 590, 592, 594, 596, 598, 600, 602, 604, 606, 608, 610, 612, 614, 616, 618, 620, 622, 624, 626, 628, 630, 632, 634,636, 638, 640, 642, 644, 646, 648, 650, 652, 654, 656, 658, 660, 662, 664, 666, or 668.

[0084] The polypeptides of the invention also include isolated polypeptides that consist essentially of the aforementioned amino acid sequences and isolated polypeptides that consist of the aforementioned amino acid sequences. The term “isolated” means altered by the hand of man from the natural state. If an “isolated” composition or substance occurs in nature, it has been changed or removed from its original environment, or both. For example, a polypeptide or a polynucleotide naturally present in a living animal is not “isolated,” but the same polypeptide of polynucleotide separated from the coexisting materials of its natural state is “isolated”,as the term is employed herein. As used herein, the term “isolated” contemplates a polypeptide (or other component) that is isolated from its natural source and/or prepared using recombinant technology.

[0085] A polypeptide sequence of the invention may be identical to the reference sequence of even numbered SEQ D NOS: 2-668, that is, 100% identical, or it may include up to a certain integer number of amino acid alterations as compared to the reference sequence such that the % identity is less than 100%. Such alterations include at least one amino acid deletion, substitution, including conservative and non-conservative substitution, or insertion. The alterations may occur at the amino- or carboxy-terminal positions of the reference polypeptide sequence or anywhere between those terminal positions, interspersed either individually among the amino acids in the reference amino acid sequence or in one or more contiguous groups within the reference amino acid sequence.

[0086] Thus, the invention also provides isolated polypeptides having sequence identity to the amino acid sequences contained in the Sequence Listing (i.e., even numbered SEQ ID NOS: 2-668). Depending on the particular sequence, the degree of sequence identity is preferably greater than 50% (e.g., 60%, 70%, 80%, 90%, 95%, 97%, 99% or more). These homologous proteins include mutants and allelic variants. “Identity,” as known in the art, is a relationship between two or more polypeptide sequences or two or more polynucleotide sequences, as determined by comparing the sequences. In the art, “identity” also means the degree of sequence relatedness between polypeptide or polynucleotide sequences, as the case may be, as determined by the match between strings of such sequences. “Identity” and “similarity” can be readily calculated by known methods, including but not limited to those described in (Computational Molecular Biology, Lesk, A. M., ed., Oxford University Press, New York, 1988; Biocomputing: Informatics and Genome Projects, Smith, D. W., ed., Academic Press, New York, 1993; Computer Analysis of Sequence Data, Part I, Griffin, A. M., and Griffin, H. G., eds., Humana Press, New Jersey, 1994; Sequence Analysis in Molecular Biology, von Heinje, G., Academic Press, 1987; and Sequence Analysis Primer, Gribskov, M. and Devereux, J., eds., M Stockton Press, New York, 1991; and Carillo, H., and Lipman, D., SIAM J. Applied Math., 48: 1073 (1988). Preferred methods to determine identity are designed to give the largest match between the sequences tested. Methods to determine identity and similarity are codified in publicly available computer programs. Preferred computer program methods to determine identity and similarity between two sequences include, but are not limited to, the GCG program package (Devereux, J., et al. 1984), BLASTP, BLASTN, and FASTA (Altschul, S. F., et al., 1990. The BLASTX program is publicly available from NCBI and other sources (BLAST Manual, Altschul, S., et al., NCBI NLM NIH Bethesda, Md. 20894; Altschul, S., et al., 1990). The well known Smith Waterman algorithm may also be used to determine identity.

[0087] For example, the number of amino acid alterations for a given % identity can be determined by multiplying the total number of amino acids in one of even numbered SEQ ID NOS: 2-668 by the numerical percent of the respective percent identity (divided by 100) and then subtracting that product from said total number of amino acids in the one of even numbered SEQ ID NOS: 2-668, or:

nₐ≦xₐ−(xₐ·y),

[0088] wherein nₐ is the number of amino acid alterations, xₐ is the total number of amino acids in the one of SEQ ID NOS: 2-668, and y is, for instance, 0.70 for 70%, 0.80 for 80%, 0.85 for 85% etc., and wherein any non-integer product of xₐ and y is rounded down to the nearest integer prior to subtracting it from xₐ.

[0089] The present invention contemplates isolated polypeptides that are substantially conserved across strains of β-hemolytic streptococci. Further, isolated polypeptides that are substantially conserved across strains of β-hemolytic streptococci and that are effective in preventing or ameliorating a β-hemolytic streptococcal colonization or infection in a susceptible subject are also contemplated by the present invention. As used herein, the term “conserved” refers to, for example, the number of amino acids that do not undergo insertions, substitution and/or deletions as a percentage of the total number of amino acids in a protein. For example, if a protein is 55% conserved and has, for example, 263 amino acids, then there are 144 amino acid positions in the protein at which amino acids do not undergo substitution. Likewise, if a protein is 90% conserved and has, for example, about 280 amino acids, then there are 28 amino acid positions at which amino acids may undergo substitution and 252 (i.e., 280 minus 28) amino acid positions at which the amino acids do not undergo substitution. According to an embodiment of the present invention, the isolated polypeptide is preferably at least about 80% conserved across the strains of β-hemolytic streptococci, more preferably at least about 85% conserved across the strains, even more preferably at least about 90% conserved across the strains, and most preferably at least about 95% conserved across the strains, without limitation.

[0090] Modifications and changes can be made in the structure of the polypeptides of even numbered SEQ ID NOS: 2-668 and still obtain a molecule having β-hemolytic streptococci and/or Streptococcus pyogenes activity and/or antigenicity. For example, certain amino acids can be substituted for other amino acids in a sequence without appreciable loss of activity and/or antigenicity. Because it is the interactive capacity and nature of a polypeptide that defines that polypeptide's biological functional activity, certain amino acid sequence substitutions can be made in a polypeptide sequence (or, of course, its underlying DNA coding sequence) and nevertheless obtain a polypeptide with like properties.

[0091] The invention includes any isolated polypeptide which is a biological equivalent that provides the desired reactivity as described herein. The term “desired reactivity” refers to reactivity that would be recognized by a person skilled in the art as being a useful result for the purposes of the invention. Examples of desired reactivity are described herein, including without limitation, desired levels of protection, desired antibody titers, desired opsonophagocytic activity and/or desired cross-reactivity, such as would be recognized by a person skilled in the art as being useful for the purposes of the present invention. The desired opsonophagocytic activity is indicated by a percent killing of bacteria as measured by decrease in colony forming units (CFU) in OPA versus a negative control. Without being limited thereto, the desired opsonophagocytic activity is preferably at least about 15%, more preferably at least about 20%, even more preferably at least about 40%, even more preferably at least about 50% and most preferably at least about 60%.

[0092] The invention includes polypeptides that are variants of the polypeptides comprising an amino acid sequence of SEQ ID NOS: 2-668. “Variant” as the term is used herein, includes a polypeptide that differs from a reference polypeptide, but retains essential properties. Generally, differences are limited so that the sequences of the reference polypeptide and the variant are closely similar overall and, in many regions, identical (i.e., biologically equivalent). A variant and reference polypeptide may differ in amino acid sequence by one or more substitutions, additions, or deletions in any combination. A substituted or inserted amino acid residue may or may not be one encoded by the genetic code. A variant of a polypeptide may be a naturally occurring such as an allelic variant, or it may be a variant that is not known to occur naturally. Non-naturally occurring variants of polypeptides may be made by direct synthesis or by mutagenesis techniques.

[0093] In making such changes, the hydropathic index of amino acids can be considered. The importance of the hydropathic amino acid index in conferring interactive biologic function on a polypeptide is generally understood in the art (Kyte & Doolittle, 1982). It is known that certain amino acids can be substituted for other amino acids having a similar hydropathic index or score and still result in a polypeptide with similar biological activity. Each amino acid has been assigned a hydropathic index on the basis of its hydrophobicity and charge characteristics. Those indices are listed in parentheses after each amino acid as follows: isoleucine (+4.5); valine (+4.2); leucine (+3.8); phenylalanine (+2.8); cysteine/cysteine (+2.5); methionine (+1.9); alanine (+1.8); glycine (−0.4); threonine (−0.7); serine (−0.8); tryptophan (−0.9); tyrosine (−1.3); proline (−1.6); histidine (−3.2); glutamate (−3.5); glutamine (−3.5); aspartate (−3.5); asparagine (−3.5); lysine (−3.9); and arginine (−4.5).

[0094] It is believed that the relative hydropathic character of the amino acid residue determines the secondary and tertiary structure of the resultant polypeptide, which in turn defines the interaction of the polypeptide with other molecules, such as enzymes, substrates, receptors, antibodies, antigens, and the like. It is known in the art that an amino acid can be substituted by another amino acid having a similar hydropathic index and still obtain a functionally equivalent polypeptide. In such changes, the substitution of amino acids whose hydropathic indices are within +/−2 is preferred, those which are within +/−1 are particularly preferred, and those within +/−0.5 are even more particularly preferred.

[0095] Substitution of like amino acids can also be made on the basis of hydrophilicity, particularly where the biological functional equivalent polypeptide or peptide thereby created is intended for use in immunological embodiments. U.S. Pat. No. 4,554,101, incorporated herein by reference, states that the greatest local average hydrophilicity of a polypeptide, as governed by the hydrophilicity of its adjacent amino acids, correlates with its immunogenicity and antigenicity, i.e., with a biological property of the polypeptide. As detailed in U.S. Pat. No. 4,554,101, the following hydrophilicity values have been assigned to amino acid residues: arginine (+3.0); lysine (+3.0); aspartate (+3.0±1); glutamate (+3.0±1); serine (+0.3); asparagine (+0.2); glutamine (+0.2); glycine (0); proline (−0.5±1); threonine (−0.4); alanine (−0.5); histidine (−0.5); cysteine (−1.0); methionine (−1.3); valine (−1.5); leucine (−1.8); isoleucine (−1.8); tyrosine (−2.3); phenylalanine (−2.5); and tryptophan (−3.4). It is understood that an amino acid can be substituted for another having a similar hydrophilicity value and still obtain a biologically equivalent and in particular, an immunologically equivalent, polypeptide. In such changes, the substitution of amino acids whose hydrophilicity values are within ±2 is preferred, those which are within ±1 are particularly preferred, and those within ±0.5 are even more particularly preferred.

[0096] As outlined above, amino acid substitutions are generally, therefore, based on the relative similarity of the amino acid side-chain substituents, for example, their hydrophobicity, hydrophilicity, charge, size, and the like. Exemplary substitutions which take various of the foregoing characteristics into consideration are well known to those of skill in the art and include: arginine and lysine; glutamate and aspartate; serine and 20 threonine; glutamine and asparagine; and valine, leucine, and isoleucine. As shown in Table XIII below, suitable amino acid substitutions include the following:

TABLE XIII

| Original | Exemplary Residue |
|---|---|
| Residue | Substitution |
| Ala | Gly; Ser |
| Arg | Lys |
| Asn | Gln; His |
| Asp | Glu |
| Cys | Ser |
| Gln | Asn |
| Glu | Asp |
| Gly | Ala |
| His | Asn; Gln |
| Ile | Leu; Val |
| Leu | Ile; Val |
| Lys | Arg |
| Met | Met; Leu; Tyr |
| Ser | Thr |
| Thr | Ser |
| Trp | Tyr |
| Tyr | Trp; Phe |
| Val | Ile; Leu |

[0097] Thus, the invention includes functional or biological equivalents of the polypeptides of SEQ ID NOS: 2-668 that contain one or more amino acid substitutions.

[0098] Biological or functional equivalents of a polypeptide can also be prepared using site-specific mutagenesis. Site-specific mutagenesis is a technique useful in the preparation of second generation polypeptides, or biologically, functionally equivalent polypeptides, derived from the sequences thereof, through specific mutagenesis of the underlying DNA. As noted above, such changes can be desirable where amino acid substitutions are desirable. The technique further provides a ready ability to prepare and test sequence variants, for example, incorporating one or more of the foregoing considerations, by introducing one or more nucleotide sequence changes into the DNA. Site-specific mutagenesis allows the production of mutants through the use of specific oligonucleotide sequences which encode the DNA sequence of the desired mutation, as well as a sufficient number of adjacent nucleotides, to provide a primer sequence of sufficient size and sequence complexity to form a stable duplex on both sides of the deletion junction being traversed. Typically, a primer of about 17 to 25 nucleotides in length is preferred, with about 5 to 10 residues on both sides of the junction of the sequence being altered.

[0099] In general, the technique of site-specific mutagenesis is well known in the art. As will be appreciated, the technique typically employs a phage vector which can exist in both a single-stranded and double-stranded form. Typically, site-directed mutagenesis in accordance herewith is performed by first obtaining a single-stranded vector which includes within its sequence a DNA sequence which encodes all or a portion of the Streptococcus pyogenes polypeptide sequence selected. An oligonucleotide primer bearing the desired mutated sequence is prepared, for example, by well known techniques (e.g., synthetically). This primer is then annealed to the single-stranded vector, and extended by the use of enzymes, such as E. coli polymerase I Klenow fragment, in order to complete the synthesis of the mutation-bearing strand. Thus, a heteroduplex is formed wherein one strand encodes the original non-mutated sequence and the second strand bears the desired mutation. This heteroduplex vector is then used to transform appropriate cells, such as E. coli cells, and clones are selected which include recombinant vectors bearing the mutation. Commercially available kits provide the necessary reagents.

[0100] The polypeptides and polypeptide antigens of the invention are understood to include any polypeptide comprising substantial sequence similarity, structural similarity, and/or functional similarity to a polypeptide comprising an amino acid sequence of any of SEQ ID NOS: 2-668. In addition, a polypeptide or polypeptide antigen of the invention is not limited to a particular source. Thus, the invention provides for the general detection and isolation of the polypeptides from a variety of sources.

[0101] The polypeptides of the invention may advantageously be cleaved into fragments for use in further structural or functional analysis, or in the generation of reagents such as Streptococcus pyogenes-related polypeptides and Streptococcus pyogenes-specific antibodies. This can be accomplished by treating purified or unpurified polypeptides of the invention with a peptidase such as endoproteinase glu-C (Boehringer, Indianapolis, Ind.). Treatment with CNBr is another method by which peptide fragments may be produced from natural Streptococcus pyogenes polypeptides. Recombinant techniques also can be used to produce specific fragments of a Streptococcus pyogenes polypeptide.

[0102] In addition, the inventors contemplate that compounds sterically similar to a particular Streptococcus pyogenes polypeptide antigen may be formulated to mimic the key portions of the peptide structure, known in the art as peptidomimetics. Mimetics are peptide-containing molecules which mimic elements of protein secondary structure. The underlying rationale behind the use of peptidomimetics is that the peptide backbone of proteins exists chiefly to orient amino acid side chains in such a way as to facilitate molecular interactions, such as those of receptor and ligand.

[0103] The invention also includes fusion proteins comprising at least one polypeptide of the invention. “Fusion protein” refers to a protein encoded by two, often unrelated, fused genes or fragments thereof. For example, fusion proteins comprising various portions of constant region of immunoglobulin molecules together with another human protein or part thereof have been described. In many cases, employing an immunoglobulin Fc region as a part of a fusion protein is advantageous for use in therapy and diagnosis resulting in, for example, improved pharmacokinetic properties (See, for example, EP-A 0232 2621). On the other hand, for some uses it would be desirable to be able to delete the Fc part after the fusion protein has been expressed, detected, and purified.

[0104] The polypeptides of the invention may be in the form of the “mature” protein or may be a part of a larger protein such as a fusion protein. It is often advantageous to include an additional amino acid sequence which contains, for example, secretory or leader sequences, pro-sequences, sequences which aid in purification such as multiple histidine residues, or an additional sequence for stability during recombinant production.

[0105] Fragments of the Streptococcus pyogenes polypeptides are also included in the invention. A fragment is a polypeptide having an amino acid sequence that entirely is the same as part, but not all, of the amino acid sequence. The fragment can comprise, for example, at least 7 or more (e.g., 8, 10, 12, 14, 16, 18, 20, or more) contiguous amino acids of an amino acid sequence of any of even numbered SEQ ID NOS: 2-668. Fragments may be “freestanding” or comprised within a larger polypeptide of which they form a part or region, most preferably as a single, continuous region. In one embodiment, the fragments include at least one epitope of the mature polypeptide sequence.

[0106] The polypeptides of the invention can be prepared in any suitable manner. Such polypeptides include naturally occurring polypeptides, recombinantly produced polypeptides, synthetically produced polypeptides, and polypeptides produced by a combination of these methods. Means for preparing such polypeptides are well understood in the art.

[0107] Polynucleotides

[0108] The invention also provides isolated polynucleotides comprising a nucleotide sequence that encodes a polypeptide of the invention, and polynucleotides closely related thereto. These polynucleotides include:

[0109] (i) an isolated polynucleotide comprising a nucleotide sequence of any of odd numbered SEQ ID NOS: 1-147 (Table I);

[0110] (ii) an isolated polynucleotide comprising a nucleotide sequence of any of odd numbered SEQ ID NOS: 149-181 (Table II);

[0111] (iii) an isolated polynucleotide comprising a nucleotide sequence of any of odd numbered SEQ ID NOS: 183-187 (Table III); and

[0112] (iv) an isolated polynucleotide comprising a nucleotide sequence of any of odd numbered SEQ ID NOS: 189- 667 (Table IV).

[0113] The polynucleotides encoding the polypeptides of the invention may be identical to the nucleotide sequences contained in Tables I-IV or they may have variant sequences which, as a result of the redundancy (degeneracy) of the genetic code, also encode polypeptides of the invention.

[0114] Further, the invention provides isolated polynucleotides having sequence identity to the nucleotide sequences of SEQ ID NOS: 1-667. Depending on the particular sequence, the degree of sequence identity is preferably greater than 70% (e.g., 80%, 90%, 95%, 97% 99% or more).

[0115] As discussed above, “identity,” as known in the art, is a relationship between two or more polypeptide sequences or two or more polynucleotide sequences, as determined by comparing the sequences. “Identity” can be readily calculated by known methods. By way of example, a polynucleotide sequence of the present invention may be identical to a reference nucleotide sequence of odd numbered SEQ ID NOS: 1-667, that is be 100% identical, or it may include up to a certain integer number of nucleotide alterations as compared to the reference nucleotide sequence. Such alterations include at least one nucleotide deletion, substitution, including transition and transversion, or insertion. The alterations may occur at the 5′ or 3′ terminal positions of the reference nucleotide sequence or anywhere between those terminal positions, interspersed either individually among the nucleotides in the reference sequence or in one or more contiguous groups within the reference nucleotide sequence. The number of nucleotide alterations is determined by multiplying the total number of nucleotides in one of odd numbered SEQ ID NOS: 1-667 by the numerical percent of the respective percent identity (divided by 100) and subtracting that product from said total number of nucleotides of the reference nucleotide sequence of any of odd numbered SEQ ID NOS: 1-667.

[0116] For example, for a polynucleotide that has at least 70% identity to a nucleotide sequence of one of odd numbered SEQ ID NOS: 1-667, the polynucleotide may include up to nₙ nucleic acid alterations over the entire length of the nucleotide sequence of one of odd numbered SEQ ID NOS: 1-667, wherein nₙ is calculated by the formula:

nₙ≦xₙ=(xₙ·y),

[0117] and wherein xₙ is the total number of nucleotides of the nucleotide sequence of one of odd numbered SEQ ID NOS: 1-667, y has a value of 0.70, and wherein any non-integer product of xₙ and y is rounded down to the nearest integer prior to subtracting such product from xₙ. Of course, y may also have a value of 0.80 for 80%, 0.85 for 85%, 0.90 for 90%, 0.95 for 95%, etc.

[0118] The invention also includes polynucleotides that encode polypeptide variants of the polypeptides comprising an amino acid sequence of SEQ D NOS: 2-668, in which one or more amino acid residues are substituted, deleted, or added, in any combination while retaining the biological activity of the native polypeptide. “Variant” as the term is used herein, is a polynucleotide that differs from a reference polynucleotide, but retains essential properties. Changes in the nucleotide sequence of the variant may or may not alter the amino acid sequence of a polypeptide encoded by the reference polynucleotide. Nucleotide changes may result in amino acid substitutions, additions, deletions, fusions, and truncations in the polypeptide encoded by the reference sequence. A variant of a polynucleotide may be naturally occurring such as an allelic variant, or it may be a variant that is not known to occur naturally. Non-naturally occurring variants of polynucleotides may be made by mutagenesis techniques or by direct synthesis.

[0119] The invention also includes polynucleotides capable of hybridizing under reduced stringency conditions, more preferably stringent conditions, and most preferably highly stringent conditions, to polynucleotides described herein. Examples of stringency conditions are shown in the Stringency Conditions Table below: highly stringent conditions are those that are at least as stringent as, for example, conditions A-F; stringent conditions are at least as stringent as, for example, conditions G-L; and reduced stringency conditions are at least as stringent as, for example, conditions M-R.

TABLE XIV
STRINGENCY CONDITIONS TABLE

| Stringency | Polynucleotide | Hybrid Length | Hybridization Temperature | Wash Temperature |
|---|---|---|---|---|
| Condition | Hybrid | (bp)^{I} | and Buffer^{H} | and Buffer^{H} |
| A | DNA:DNA | >50 | 65° C.; 1xSSC -or- | 65° C.; 0.3xSSC |
| | | | 42° C.; 1xSSC, 50% formamide | |
| B | DNA:DNA | <50 | T_{B}; 1xSSC | T_{B}; 1xSSC |
| C | DNA:RNA | >50 | 67° C.; 1xSSC -or- | 67° C.; 0.3xSSC |
| | | | 45° C.; 1xSSC, 50% formamide | |
| D | DNA:RNA | <50 | T_{D}; 1xSSC | T_{D}; 1xSSC |
| E | RNA:RNA | >50 | 70° C.; 1xSSC -or- | 70° C.; 0.3xSSC |
| | | | 50° C.; 1xSSC, 50% formamide | |
| F | RNA:RNA | <50 | T_{F}; 1xSSC | T_{f}; 1xSSC |
| G | DNA:DNA | >50 | 65° C.; 4xSSC -or- | 65° C.; 1xSSC |
| | | | 42° C.; 4xSSC, 50% formamide | |
| H | DNA:DNA | <50 | T_{H}; 4xSSC | T_{H}; 4xSSC |
| I | DNA:RNA | >50 | 67° C.; 4xSSC -or- | 67° C.; 1xSSC |
| | | | 45° C.; 4xSSC, 50% formamide | |
| J | DNA:RNA | <50 | T_{J}; 4xSSC -or- | T_{J}; 4xSSC |
| K | RNA:RNA | >50 | 70° C.; 4xSSC -or- | 67° C.; 1xSSC |
| | | | 50° C.; 4xSSC, 50% formamide | |
| L | RNA:RNA | <50 | T_{L}; 2xSSC | T_{L}; 2xSSC |
| M | DNA:DNA | >50 | 50° C.; 4xSSC -or- | 50° C.; 2xSSC |
| | | | 40° C.; 6xSSC, 50% formamide | |
| N | DNA:DNA | <50 | T_{N}; 6xSSC | T_{N}; 6xSSC |
| O | DNA:RNA | >50 | 55° C.; 4xSSC -or- | 55° C.; 2xSSC |
| | | | 42° C.; 6xSSC, 50% formamide | |
| P | DNA:RNA | <50 | T_{P}; 6xSSC | T_{P}; 6xSSC |
| Q | RNA:RNA | >50 | 60° C.; 4xSSC -or- | 60° C.; 2xSSC |
| | | | 45° C.; 6xSSC, 50% formamide | |
| R | RNA:RNA | <50 | T_{R}; 4xSSC | T_{R}; 4xSSC |
| bp^{I}: The hybrid length is that anticipated for the hybridized region(s) of the hybridizing polynucleotides. When hybridizing a polynucleotide to a target polynucleotide of unknown sequence, the hybrid length is assumed to be that of the hybridizing polynucleotide. When polynucleotides of known sequence are hybridized, the hybrid length can be determined by aligning the sequences of the polynucleotides and identifying the region or regions of optimal sequence complementarity. | | | | |
| buffer^{H}: SSPE (1xSSPE is 0.15 M NaCl, 10 mM NaH₂PO₄, and 1.25 mM EDTA, pH 7.4) can be substituted for SSC (1xSSC is 0.15 M NaCl and 15 mM sodium citrate) in the hybridization and wash buffers; washes are performed for 15 minutes after hybridization is complete. | | | | |
| T_{B} through T_{R}: The hybridization temperature for hybrids anticipated to be less than 50 base pairs in length should be 5-10EC less than the melting temperature (Tₘ) of the hybrid, where Tₘ is determined according to the following equations. For hybrids less than 18 base pairs in length, Tₘ(EC) = 2(# of A + T bases) + 4(# of G + C bases). For hybrids between 18 | | | | |
| # and 49 base pairs in length, Tₘ(EC) = 81.5 + 16.6(log₁₀[Na⁺]) + 0.41(% G + C) − (600/N), where N is the number of bases in the hybrid, and [Na⁺] is the concentration of sodium ions in the hybridization buffer ([Na⁺] for 1xSSC = 0.165 M). | | | | |

[0120] Additional examples of stringency conditions for polynucleotide hybridization are provided in Sambrook, J., E. F. Fritsch, and T. Maniatis, 1989, Molecular Cloning: A Laboratory Manual, Cold Spring Harbor Laboratory Press, Cold Spring Harbor, N.Y., chapters 9 and 11, and Current Protocols in Molecular Biology, 1995, F. M. Ausubel et al., eds., John Wiley & Sons, Inc., sections 2.10 and 6.3-6.4, incorporated herein by reference.

[0121] The invention also provides polynucleotides that are fully complementary to these polynucleotides and also provides antisense sequences. The antisense sequences of the invention, also referred to as antisense oligonucleotides, include both internally generated and externally administered sequences that block expression of polynucleotides encoding the polypeptides of the invention. The antisense sequences of the invention comprise, for example, about 15-20 base pairs. The antisense sequences can be designed, for example, to inhibit transcription by preventing promoter binding to an upstream nontranslated sequence or by preventing translation of a transcript encoding a polypeptide of the invention by preventing the ribosome from binding.

[0122] The polynucleotides of the invention are prepared in many ways (e.g., by chemical synthesis, from DNA libraries, from the organism itself) and can take various forms (e.g., single-stranded, double-stranded, vectors, probes, primers). The term “polynucleotide” includes DNA and RNA, and also their analogs, such as those containing modified backbones.

[0123] When the polynucleotides of the invention are used for the recombinant production of polypeptides, the polynucleotide may include the coding sequence of the mature polypeptide or a fragment thereof, by itself, the coding sequence of the mature polypeptide or fragment in reading frame with other coding sequences, such as those encoding a leader or secretory sequence, a pre-, pro-, or prepro- protein sequence, or other fusion protein portions. For example, a marker sequence which facilitates purification of the fused polypeptide can be linked to the coding sequence. The polynucleotide may also contain non-coding 5′ and 3′ sequences, such as transcribed, non-translated sequences, splicing and polyadenylation signals, ribosome binding sites, and sequences that stabilize mRNA.

[0124] Expression Systems and Vectors

[0125] For recombinant production, host cells are genetically engineered to incorporate expression systems, portions thereof, or polynucleotides of the invention. Introduction of polynucleotides into host cells are effected, for example, by methods described in many standard laboratory manuals, such as Davis et al., BASIC METHODS IN MOLECULAR BIOLOGY (1986) and Sambrook et al., MOLECULAR CLONING: A LABORATORY MANUAL, 2nd ed., Cold Spring Harbor Laboratory Press, Cold Spring Harbor, N.Y. (1989), such as calcium phosphate transfection, DEAE-dextran mediated transfection, transvection, microinjection, ultrasound, cationic lipid-mediated transfection, electroporation, transduction, scrape loading, ballistic introduction, or infection.

[0126] Representative examples of suitable hosts include bacterial cells (e.g., streptococci, staphylococci, E. coli, Streptomyces and Bacillus subtilis cells), yeast cells (e.g., Pichia, Saccharomyces), mammalian cells (e.g., vero, Chinese hamster ovary, chick embryo fibroblasts, BHK cells, human SW13 cells), and insect cells (e.g., Sf9, Sf21).

[0127] The recombinantly produced polypeptides are recovered and purified from recombinant cell cultures by well-known methods, including high performance liquid chromatography, ammonium sulfate or ethanol precipitation, acid extraction, anion or cation exchange chromatography, phosphocellulose chromatography, hydrophobic interaction chromatography, affinity chromatography, hydroxylapatite chromatography, and lectin chromatography.

[0128] A great variety of expression systems are used. Such systems include, among others, chromosomal, episomal and virus-derived systems, e.g., vectors derived from bacterial plasmids, attenuated bacteria such as Salmonella (U.S. Pat. No. 4,837,151) from bacteriophage, from transposons, from yeast episomes, from insertion elements, from yeast chromosomal elements, from viruses such as vaccinia and other poxviruses, sindbis, adenovirus, baculoviruses, papova viruses, such as SV40, fowl pox viruses, pseudorabies viruses and retroviruses, alphaviruses such as Venezuelan equine encephalitis virus (U.S. Pat. No. 5,643,576), nonsegmented negative-stranded RNA viruses such as vesicular stomatitis virus (U.S. Pat. No. 6,168,943), and vectors derived from combinations thereof, such as those derived from plasmid and bacteriophage genetic elements, such as cosmids and phagemids. The expression systems should include control regions that regulate as well as engender expression, such as promoters and other regulatory elements (such as a polyadenylation signal). Generally, any system or vector suitable to maintain, propagate or express polynucleotides to produce a polypeptide in a host may be used. The appropriate nucleotide sequence may be inserted into an expression system by any of a variety of well-known and routine techniques, such as, for example, those set forth in Sambrook et al., MOLECULAR CLONING, A LABORATORY MANUAL (supra).

[0129] The invention also provides vectors (e.g., expression vectors, sequencing vectors, cloning vectors) which comprise a polynucleotide or polynucleotides of the invention, host cells which are genetically engineered with vectors of the invention, and production of polypeptides of the invention by recombinant techniques. Cell-free translation systems can also be employed to produce such proteins using RNAs derived from the DNA constructs of the invention.

[0130] Preferred vectors are viral vectors, such as lentiviruses, retroviruses, herpes viruses, adenoviruses, adeno-associated viruses, vaccinia virus, baculovirus, and other recombinant viruses with desirable cellular tropism. Thus, a gene encoding a functional or mutant protein or polypeptide, or fragment thereof can be introduced in vivo, ex vivo, or in vitro using a viral vector or through direct introduction of DNA. Expression in targeted tissues can be effected by targeting the transgenic vector to specific cells, such as with a viral vector or a receptor ligand, or by using a tissue-specific promoter, or both. Targeted gene delivery is described in PCT Publication Number WO 95/28494.

[0131] Viral vectors commonly used for in vivo or ex vivo targeting and therapy procedures are DNA-based vectors and retroviral vectors. Methods for constructing and using viral vectors are known in the art (e.g., Miller and Rosman, BioTechniques, 1992, 7:980-990). Preferably, the viral vectors are replication-defective, that is, they are unable to replicate autonomously in the target cell. Preferably, the replication defective virus is a minimal virus, i.e., it retains only the sequences of its genome which are necessary for encapsulating the genome to produce viral particles.

[0132] DNA viral vectors include an attenuated or defective DNA virus, such as, but not limited to, herpes simplex virus (HSV), papillomavirus, Epstein Barr virus (EBV), adenovirus, adeno-associated virus (AAV), and the like. Defective viruses, which entirely or almost entirely lack viral genes, are preferred. A defective virus is not infective after introduction into a cell. Use of defective viral vectors allows for administration to cells in a specific, localized area, without concern that the vector can infect other cells. Thus, a specific tissue can be specifically targeted. Examples of particular vectors include, but are not limited to, a defective herpes virus 1 (HSV1) vector (Kaplitt et al., Molec. Cell. Neurosci., 1991, 2:320-330), defective herpes virus vector lacking a glycoprotein L gene, or other defective herpes virus vectors (PCT Publication Numbers WO 94/21807 and WO 92/05263); an attenuated adenovirus vector, such as the vector described by Stratford-Perricaudet et al. (J. Clin. Invest., 1992, 90:626-630; see also La Salle et al., Science, 1993, 259:988-990); and a defective adeno-associated virus vector (Samulski et al., J. Virol., 1987, 61:3096-3101; Samulski et al., J. Virol., 1989, 63:3822-3828; Lebkowski et al., Mol. Cell. Biol., 1988, 8:3988-3996).

[0133] Various companies produce viral vectors commercially, including, but not limited to, Avigen, Inc. (Alameda, Calif.; AAV vectors), Cell Genesys (Foster City, Calif.; retroviral, adenoviral, AAV vectors, and lentiviral vectors), Clontech (retroviral and baculoviral vectors), Genovo, Inc. (Sharon Hill, Pa.; adenoviral and AAV vectors), Genvec (adenoviral vectors), IntroGene (Leiden, Netherlands; adenoviral vectors), Molecular Medicine (retroviral, adenoviral, AAV, and herpes viral vectors), Norgen (adenoviral vectors), Oxford BioMedica (Oxford, United Kingdom; lentiviral vectors), and Transgene (Strasbourg, France; adenoviral, vaccinia, retroviral, and lentiviral vectors).

[0134] Adenoviruses are eukaryotic DNA viruses that can be modified to efficiently deliver a nucleotide of the invention to a variety of cell types. Various serotypes of adenovirus exist. Of these serotypes, preference is given, within the scope of the invention, to using type 2 or type 5 human adenoviruses (Ad 2 or Ad 5) or adenoviruses of animal origin (See, PCT Publication Number WO 94/26914.). Those adenoviruses of animal origin which can be used within the scope of the invention include adenoviruses of canine, bovine, murine (e.g., Mav1, Beard et al., Virology, 1990, 75-81), ovine, porcine, avian, and simian (e.g., SAV) origin. Preferably, the adenovirus of animal origin is a canine adenovirus, more preferably a CAV2 adenovirus (e.g., Manhattan or A26/61 strain, ATCC VR-800, for example). Various replication defective adenovirus and minimum adenovirus vectors have been described (e.g., PCT Publication Numbers WO 94/26914, WO 95/02697, WO 94/28938, WO 94/28152, WO 94/12649, WO 95/02697, WO 96/22378). The replication defective recombinant adenoviruses according to the invention can be prepared by any technique known to the person skilled in the art (e.g., Levrero et al., Gene, 1991, 101:195; European Publication Number EP 185 573; Graham, EMBO J., 1984, 3:2917; Graham et al., J. Gen. Virol., 1977, 36:59). Recombinant adenoviruses are recovered and purified using standard molecular biological techniques, which are well known to one of ordinary skill in the art.

[0135] The adeno-associated viruses (AAV) are DNA viruses of relatively small size that can integrate, in a stable and site-specific manner, into the genome of the cells which they infect. They are able to infect a wide spectrum of cells without inducing any effects on cellular growth, morphology, or differentiation, and they do not appear to be involved in human pathologies. The AAV genome has been cloned, sequenced, and characterized. The use of vectors derived from the AAVs for transferring genes in vitro and in vivo has been described (See, PCT Publication Numbers WO 91/18088 and WO 93/09239; U.S. Pat. Nos. 4,797,368 and 5,139,941; European Publication Number EP 488 528). The replication defective recombinant AAVs according to the invention can be prepared by cotransfecting a plasmid containing the nucleic acid sequence of interest flanked by two AAV inverted terminal repeat (ITR) regions, and a plasmid carrying the AAV encapsidation genes (rep and cap genes), into a cell line which is infected with a human helper virus (for example, an adenovirus). The AAV recombinants which are produced are then purified by standard techniques.

[0136] In another embodiment, the gene can be introduced in a retroviral vector, e.g., as described in U.S. Pat. No. 5,399,346; Mann et al., Cell, 1983, 33:153; U.S. Pat. Nos. 4,650,764 and 4,980,289; Markowitz et al., J. Virol., 1988, 62:1120; U.S. Pat. No. 5,124,263; European Publication Numbers EP 453 242 and EP178 220; Bernstein et al., Genet. Eng., 1985, 7:235; McCormick, BioTechnology, 1985, 3:689; PCT Publication Number WO 95/07358; and Kuo et al., Blood, 1993, 82:845. The retroviruses are integrating viruses that infect dividing cells. The retrovirus genome includes two LTRs, an encapsidation sequence, and three coding regions (gag, pol and env). In recombinant retroviral vectors, the gag, pol and env genes are generally deleted, in whole or in part, and replaced with a heterologous nucleic acid sequence of interest. These vectors can be constructed from different types of retrovirus, such as, HIV, MoMuLV (“murine Moloney leukaemia virus”), MSV (“murine Moloney sarcoma virus”), HaSV (“Harvey sarcoma virus”), SNV (“spleen necrosis virus”), RSV (“Rous sarcoma virus”), and Friend virus. Suitable packaging cell lines have been described, in particular the cell line PA317 (U.S. Pat. No. 4,861,719), the PsiCRIP cell line (PCT Publication Number WO 90/02806), and the GP+envAm-12 cell line (PCT Publication Number WO 89/07150). In addition, the recombinant retroviral vectors can contain modifications within the LTRs for suppressing transcriptional activity as well as extensive encapsidation sequences which may include a part of the gag gene (Bender et al., J. Virol., 1987, 61:1639). Recombinant retroviral vectors are purified by standard techniques known to those having ordinary skill in the art.

[0137] Retroviral vectors can be constructed to function as infectious particles or to undergo a single round of transfection. In the former case, the virus is modified to retain all of its genes except for those responsible for oncogenic transformation properties, and to express the heterologous gene. Non-infectious viral vectors are manipulated to destroy the viral packaging signal, but retain the structural genes required to package the co-introduced virus engineered to contain the heterologous gene and the packaging signals. Thus, the viral particles that are produced are not capable of producing additional virus.

[0138] Retrovirus vectors can also be introduced by DNA viruses, which permits one cycle of retroviral replication and amplifies transfection efficiency (See, PCT Publication Numbers WO 95/22617, WO 95/26411, WO 96/39036 and WO 97/19182.).

[0139] In another embodiment, lentiviral vectors can be used as agents for the direct delivery and sustained expression of a transgene in several tissue types, including brain, retina, muscle, liver, and blood. The vectors can efficiently transduce dividing and nondividing cells in these tissues, and maintain long-term expression of the gene of interest. For a review, see, Naldini, Curr. Opin. Biotechnol., 1998, 9:457-63; see also, Zufferey et al., J. Virol., 1998, 72:9873-80. Lentiviral packaging cell lines are available and known generally in the art. They facilitate the production of high-titer lentivirus vectors for gene therapy. An example is a tetracycline-inducible VSV-G pseudotyped lentivirus packaging cell line that can generate virus particles at titers greater than 106 IU/ml for at least 3 to 4 days (Kafri et al., J. Virol., 1999, 73: 576-584). The vector produced by the inducible cell line can be concentrated as needed for efficiently transducing non-dividing cells in vitro and in vivo.

[0140] In another embodiment, the vector can be introduced in vivo by lipofection, as naked DNA, or with other transfection facilitating agents (peptides, polymers, etc.). Synthetic cationic lipids can be used to prepare liposomes for in vivo transfection of a gene encoding a marker (Felgner et al., Proc. Natl. Acad. Sci. U.S.A., 1987, 84:7413-7417; Felgner and Ringold, Science, 1989, 337:387-388; Mackey et al., Proc. Natl. Acad. Sci. U.S.A., 1988, 85:8027-8031; Ulmer et al., Science, 1993, 259:1745-1748). Useful lipid compounds and compositions for transfer of nucleic acids are described in PCT Patent Publication Numbers WO 95/18863 and WO 96/17823, and in U.S. Pat. No. 5,459,127. Lipids may be chemically coupled to other molecules for the purpose of targeting (see Mackey, et al., supra). Targeted peptides, e.g., hormones or neurotransmitters, and proteins such as antibodies, or non-peptide molecules could be coupled to liposomes chemically.

[0141] One can also introduce the vector in vivo as a naked DNA plasmid. Naked DNA vectors for gene therapy can be introduced into the desired host cells by methods known in the art, e.g., electroporation, microinjection, cell fusion, DEAE dextran, calcium phosphate precipitation, use of a gene gun, or use of a DNA vector transporter (e.g., Wu et al., J. Biol. Chem., 1992, 267:963-967; Wu and Wu, J. Biol. Chem., 1988, 263:14621-14624; Canadian Patent Application Number 2,012,311; Williams et al., Proc. Natl. Acad. Sci. USA, 1991, 88:2726-2730). Receptor-mediated DNA delivery approaches can also be used (Curiel et al., Hum. Gene Ther., 1992, 3:147-154; Wu and Wu, J. Biol. Chem., 1987, 262:4429-4432). U.S. Pat. Nos. 5,580,859 and 5,589,466 disclose delivery of exogenous DNA sequences, free of transfection facilitating agents, in a mammal. Recently, a relatively low voltage, high efficiency in vivo DNA transfer technique, termed electrotransfer, has been described (Mir et al., C.P. Acad.. Sci., 1988, 321:893; PCT Publication Numbers WO 99/01157; WO 99/01158; WO 99/01175).

[0142] Other molecules are also useful for facilitating transfection of a nucleic acid in vivo, such as a cationic oligopeptide (e.g., PCT Patent Publication Number WO 95/21931), peptides derived from DNA binding proteins (e.g., PCT Patent Publication Number WO 96/25508), or a cationic polymer (e.g., PCT Patent Publication Number WO 95/21931), or bupivacaine (U.S. Pat. No. 5,593,972).

[0143] The isolated polypeptide of the present invention can be delivered to the mammal using a live vector, in particular using live recombinant bacteria, viruses, or other live agents, containing the genetic material necessary for the expression of the polypeptide or immunogenic fragment as a foreign polypeptide. Particularly, bacteria that colonize the gastrointestinal tract, such as Salmonella, Shigella, Yersinia, Vibrio, Escherichia and BCG have been developed as vaccine vectors, and these and other examples are discussed by Holmgren et al. (1992) and McGhee et al. (1992).

[0144] The following might be used as part of a list of RNA vectors, in which one or more of the immunogenic candidate proteins may be inserted.

[0145] Classification of nonsegmented, negative-sense, single stranded RNA Viruses of the Order Mononegavirales

[0146] Family Paramyxoviridae

[0147] Subfamily Paramyxovirinae

[0148] Genus Paramyxovirus

[0149] Sendai virus (mouse parainfluenza virus type 1)

[0150] Human parainfluenza virus (PIV) types 1 and 3

[0151] Bovine parainfluenza virus (BPV) type 3

[0152] Genus Rubulavirus

[0153] Simian virus 5 (SV) (Canine parainfluenza virus type 2)

[0154] Mumps virus

[0155] Newcastle disease virus (NDV) (avian Paramyxovirus 1)

[0156] Human parainfluenza virus (PIV-types 2, 4a and 4b)

[0157] Genus Morbillivirus

[0158] Measles virus (MV)

[0159] Dolphin Morbillivirus

[0160] Canine distemper virus (CDV)

[0161] Peste-des-petits-ruminants virus

[0162] Phocine distemper virus

[0163] Rinderpest virus

[0164] Unclassified

[0165] Hendra virus

[0166] Nipah virus

[0167] Subfamily Pneumovirinae

[0168] Genus Pneumovirus

[0169] Human respiratory syncytial virus (RSV)

[0170] Bovine respiratory syncytial virus

[0171] Pneumonia virus of mice

[0172] Genus Metapneumovirus

[0173] Human metapneumovirus

[0174] Avian pneumovirus (formerly Turkey rhinotracheitis virus)

[0175] Family Rhabdoviridae

[0176] Genus Lyssavirus

[0177] Rabies virus

[0178] Genus Vesiculovirus

[0179] Vesicular stomatitis virus (VSV)

[0180] Genus Ephemerovirus

[0181] Bovine ephemeral fever virus

[0182] Family Filovirdae

[0183] Genus Filovirus

[0184] Marburg virus

[0185] The RNA virus vector is basically an isolated nucleic acid molecule that comprises a sequence which encodes at least one genome or antigenome of a nonsegmented, negative-sense, single stranded RNA virus of the Order Mononegavirales. The isolated nucleic acid molecule may comprise a polynucleotide sequence which encodes a genome, antigenome, or a modified version thereof. In one embodiment, the polynucleotide encodes an operably linked promoter, the desired genome or antigenome, and a transcriptional terminator.

[0186] In a preferred embodiment of this invention, the polynucleotide encodes a genome or antigenome that has been modified from a wild-type RNA virus by a nucleotide insertion, rearrangement, deletion, or substitution. The genome or antigenome sequence can be derived from a human or non-human virus. The polynucleotide sequence may also encode a chimeric genome formed from recombinantly joining a genome or antigenome from two or more sources. For example, one or more genes from the A group of RSV are inserted in place of the corresponding genes of the B group of RSV; or one or more genes from bovine PIV (BPIV), PIV-1 or PIV-2 are inserted in the place of the corresponding genes of PIV-3; or RSV may replace genes of PIV and so forth. In additional embodiments, the polynucleotide encodes a genome or anti-genome for an RNA virus of the Order Mononegavirales which is a human, bovine, or murine virus. Since the recombinant viruses formed by the methods of this invention are employed for therapeutic or prophylactic purposes, the polynucleotide may also encode an attenuated or an infectious form of the RNA virus selected. In many embodiments, the polynucleotide encodes an attenuated, infectious form of the RNA virus. In particularly preferred embodiments, the polynucleotide encodes a genome or antigenome of a nonsegmented, negative-sense, single stranded RNA virus of the Order Mononegavirales having at least one attenuating mutation in the 3′ genomic promoter region and having at least one attenuating mutation in the RNA polymerase gene, as described by published International patent application WO 98/13501, which is hereby incorporated by reference.

[0187] As vectors, the polynucleotide sequences encoding the modified forms of the desired genome and antigenome as described above also encode one or more genes or nucleotide sequences for the immunogenic proteins of this invention. In addition, one or more heterologous genes may also be included in forming a desired immunogenic composition/vector, as desired. Depending on the application of the desired recombinant virus, the heterologous gene may encode a co-factor, cytokine (such an interleukin), a T-helper epitope, a restriction marker, adjuvant, or a protein of a different microbial pathogen (e.g., virus, bacterium, or fungus), especially proteins capable of eliciting a protective immune response. The heterologous gene may also be used to provide agents which are used for gene therapy. In preferred embodiments, the heterologous genes encode cytokines, such as interleukin-12, which are selected to improve the prophylactic or therapeutic characteristics of the recombinant virus.

[0188] Antibodies

[0189] The polypeptides of the invention, including the amino acid sequences of even numbered SEQ ID NOS: 2-668, their fragments, and analogs thereof, or cells expressing them, can also be used as immunogens to produce antibodies immunospecific for the polypeptides of the invention. The invention includes antibodies immunospecific for β-hemolytic streptococci and Streptococcus pyogenes polypeptides and the use of such antibodies to detect the presence of, or measure the quantity or concentration of, β-hemolytic streptococci and Streptococcus pyogenes polypeptides in a cell, a cell or tissue extract, or a biological fluid.

[0190] The antibodies of the invention include polyclonal antibodies, monoclonal antibodies, chimeric antibodies, and anti-idiotypic antibodies. Polyclonal antibodies are heterogeneous populations of antibody molecules derived from the sera of animals immunized with an antigen. Monoclonal antibodies are a substantially homogeneous population of antibodies to specific antigens. Monoclonal antibodies may be obtained by methods known to those skilled in the art, e.g., Kohler and Milstein, 1975, Nature 256:495-497 and U.S. Pat. No. 4,376,110. Such antibodies may be of any immunoglobulin class including IgG, IgM, IgE, IgA, GILD and any subclass thereof.

[0191] Chimeric antibodies are molecules, different portions of which are derived from different animal species, such as those having variable region derived from a murine monoclonal antibody and a human immunoglobulin constant region. Chimeric antibodies and methods for their production are known in the art (Cabilly et al., 1984, Proc. Natl. Acad. Sci. USA 81:3273-3277; Morrison et al., 1984, Proc. Natl. Acad. Sci. USA 81:6851-6855; Boulianne et al., 1984, Nature 312:643-646; Cabilly et al., European Patent Application 125023 (published Nov. 14, 1984); Taniguchi et al., European Patent Application 171496 (published Feb. 19, 1985); Morrison et al., European Patent Application 173494 (published Mar. 5, 1986); Neuberger et al., PCT Application WO 86/01533 (published Mar. 13, 1986); Kudo et al., European Patent Application 184187 (published Jun. 11, 1986); Morrison et al., European Patent Application 173494 (published Mar. 5, 1986); Sahagan et al., 1986, J. Immunol. 137:1066-1074; Robinson et al., PCT/US86/02269 (published May 7, 1987); Liu et al., 1987, Proc. Natl. Acad. Sci. USA 84:3439-3443; Sun et al., 1987, Proc. Natl. Acad. Sci. USA 84:214-218; Better et al., 1988, Science 240:1041-1043). These references are hereby incorporated by reference.

[0192] An anti-idiotypic (anti-Id) antibody is an antibody which recognizes unique determinants generally associated with the antigen-binding site of an antibody. An anti-Id antibody is prepared by immunizing an animal of the same species and genetic type (e.g., mouse strain) as the source of the monoclonal antibody with the monoclonal antibody to which an anti-Id is being prepared. The immunized animal will recognize and respond to the idiotypic determinants of the immunizing antibody by producing an antibody to these isotypic determinants (the anti-Id antibody).

[0193] Accordingly, monoclonal antibodies generated against the polypeptides of the present invention may be used to induce anti-Id antibodies in suitable animals. Spleen cells from such immunized mice can be used to produce anti-Id hybridomas secreting anti-Id monoclonal antibodies. Further, the anti-Id antibodies can be coupled to a carrier such as keyhole limpet hemocyanin (KLH) and used to immunize additional BALB/c mice. Sera from these mice will contain anti-anti-Id antibodies that have the binding properties of the final mAb specific for a R-PTPase epitope. The anti-Id antibodies thus have their idiotypic epitopes, or “idiotopes” structurally similar to the epitope being evaluated, such as Streptococcus pyogenes polypeptides.

[0194] The term “antibody” is also meant to include both intact molecules as well as fragments such as Fab which are capable of binding antigen. Fab fragments lack the Fc fragment of intact antibody, clear more rapidly from the circulation, and may have less non-specific tissue binding than an intact antibody (Wahl et al., 1983, J. Nucl. Med. 24:316-325). It will be appreciated that Fab and other fragments of the antibodies useful in the present invention may be used for the detection and quantitation of Streptococcus pyogenes polypeptides according to the methods for intact antibody molecules.

[0195] The anti-Id antibody may also be used as an “immunogen” to induce an immune response in yet another animal, producing a so-called anti-anti-Id antibody. The anti-anti-Id may be epitopically identical to the original mAb which induced the anti-Id. Thus, by using antibodies to the idiotypic determinants of a mAb, it is possible to identify other clones expressing antibodies of identical specificity.

[0196] The antibodies are used in a variety of ways, e.g., for confirmation that a protein is expressed, or to confirm where a protein is expressed. Labeled antibody (e.g., fluorescent labeling for FACS) can be incubated with intact bacteria and the presence of the label on the bacterial surface confirms the location of the protein, for instance.

[0197] Antibodies generated against the polypeptides of the invention can be obtained by administering the polypeptides or epitope-bearing fragments, analogs, or cells to an animal using routine protocols. For preparing monoclonal antibodies, any technique which provides antibodies produced by continuous cell line cultures are used.

[0198] Immunogenic Compositions

[0199] Also provided are immunogenic compositions. The immunogenic compositions of the present invention can be used for the treatment of streptococcal infections in mammals, such as humans (preferably) and non-human animals. For example, the animals may be bovine, canine, equine, feline, and porcine. It is noted that SEQ ID NO: 415 (ORF 1021) corresponds to a protein which also appears in S. equi. Accordingly, this sequence can be used in immunogenic compositions for treating equine infections, as well as in other animals or humans. Particular applications include, but are not limited to, the treatment of strangles, a highly contagious disease of the nasopharynx and draining lymph nodes of Equidae, and the treatment of respiratory infections and mastitis in bovines, equines, and swine.

[0200] The immunogenic compositions of the invention may either be prophylactic (i.e., to prevent infection or reduce the onset of infection) or therapeutic (i.e., to treat a disease or side effects caused by an infection after the infection).

[0201] The immunogenic compositions may comprise a polypeptide of the invention. To do so, one or more polypeptides are adjusted to an appropriate concentration and can be formulated with any suitable adjuvant, diluent, carrier, or any combination thereof Physiologically acceptable media may be used as carriers and/or diluents. These include, but are not limited to, water, an appropriate isotonic medium, glycerol, ethanol and other conventional solvents, phosphate buffered saline, and the like.

[0202] As used herein, an “adjuvant” is a substance that serves to enhance the immunogenicity of an antigen, whether it is a polypeptide or a polynucleotide. Thus, adjuvants are often given to boost the immune response and are well known to the skilled artisan. Suitable adjuvants include, but are not limited to, aluminum salts (alum), such as aluminum phosphate and aluminum hydroxide, Mycobacterium tuberculosis, Bordetella pertussis, bacterial lipopolysaccharides, aminoalkyl glucosamine phosphate compounds (AGP), or derivatives or analogs thereof, which are available from Corixa (Hamilton, Mont.), and which are described in U.S. Pat. No. 6,113,918, which is hereby incorporated by reference. One such AGP is 2-ethyl 2-Deoxy-4-O-phosphono-3-O-2-b-D-glucopyranoside, which is also known as 529 (formerly known as RC529). This 529 adjuvant is formulated as an aqueous form or as a stable emulsion. Other adjuvants are MPL® (3-0-deacylated monophosphoryl lipid A) (Corixa) described in U.S. Pat. No. 4,912,094, synthetic polynucleotides such as oligonucleotides containing a CpG motif (U.S. Pat. No. 6,207,646, saponins such as Quil A or STIMULON® QS-21 (Antigenics, Framingham, Mass.), described in U.S. Pat. No. 5,057,540, a pertussis toxin (PT), or an E. coli heat-labile toxin (LT), particularly LT-K63, LT-R72, CT-S109, PT-K9/G129; see, e.g., International Patent Publication Nos. WO 93/13302 and WO 92/19265, cholera toxin (either in a wild-type or mutant form, for example, wherein the glutamic acid at amino acid position 29 is replaced by another amino acid, preferably a histidine, in accordance with published International Patent Application number WO 00/18434).

[0203] Various cytokines and lymphokines are suitable for use as adjuvants. One such adjuvant is granulocyte-macrophage colony stimulating factor (GM-CSF), which has a nucleotide sequence as described in U.S. Pat. No. 5,078,996, which is hereby incorporated by reference. A plasmid containing GM-CSF cDNA has been transformed into E. coli and has been deposited with the American Type Culture Collection (ATCC), 10801 University Boulevard, Manassas, Va. 20110-2209, under Accession Number 39900. The cytokine Interleukin-12 (IL-12) is another adjuvant which is described in U.S. Pat. No. 5,723,127, which is hereby incorporated by reference. Other cytokines or lymphokines have been shown to have immune modulating activity, including, but not limited to, the interleukins 1-alpha, 1-beta, 2, 4, 5, 6, 7, 8, 10, 13, 14, 15, 16, 17 and 18, the interferons-alpha, beta and gamma, granulocyte colony stimulating factor, and the tumor necrosis factors alpha and beta, and are suitable for use as adjuvants.

[0204] The polypeptide can also include at least a portion of the polypeptide, optionally conjugated or linked to a peptide, polypeptide, or protein, or to a polysaccharide.

[0205] The immunogenic compositions of the invention can further include immunogenic conjugates as disclosed in U.S. Pat. Nos. 4,673,574, 4,902,506, 5,097,020, and 5,360,897 (assigned to The University of Rochester), hereby incorporated by reference. These patents teach immunogenic conjugates which are the reductive amination product of an immunogenic capsular polymer fragment having a reducing end and derived from a bacterial capsular polymer of a bacterial pathogen, and a bacterial toxin or toxoid. The present invention also includes immunogenic compositions containing these conjugates which elicit effective levels of anti-capsular polymer antibodies in humans.

[0206] Combination immunogenic compositions are provided by including two or more of the polypeptides of the invention, as well as by combining one or more of the polypeptides of the invention with one or more known Streptococcus pyogenes polypeptides, including, but not limited to, the C5a peptidase, the M proteins, adhesins, and the like.

[0207] The immunogenic compositions of the invention also comprise a polynucleotide sequence of the invention operatively associated with a regulatory sequence that controls gene expression. The polynucleotide sequence of interest is engineered into an expression vector, such as a plasmid, under the control of regulatory elements which will promote expression of the DNA, that is, promoter and/or enhancer elements. In a preferred embodiment, the human cytomegalovirus immediate-early promoter/enhancer is used (U.S. Pat. No. 5,168,062). The promoter may be cell-specific and permit substantial transcription of the polynucleotide only in predetermined cells.

[0208] The polynucleotide is introduced directly into the host either as “naked” DNA (U.S. Pat. No. 5,580,859) or formulated in compositions with agents which facilitate immunization, such as bupivacaine and other local anesthetics (U.S. Pat. No. 5,593,972) and cationic polyamines (U.S. Pat. No. 6,127,170).

[0209] In this polynucleotide immunization procedure, the polypeptides of the invention are expressed on a transient basis in vivo; no genetic material is inserted or integrated into the chromosomes of the host. This procedure is to be distinguished from gene therapy, where the goal is to insert or integrate the genetic material of interest into the chromosome. An assay is used to confirm that the polynucleotides administered by immunization do not give rise to a transformed phenotype in the host (U.S. Pat. No. 6,168,918).

[0210] Once formulated, the immunogenic compositions of the invention can be administered directly to the subject, delivered ex vivo to cells derived from the subject, or in vitro for expression of recombinant proteins. For delivery directly to the subject, administration may be by any conventional form, such as intranasally, parenterally, orally, intraperitoneally, intravenously, subcutaneously, or topically applied to any mucosal surface such as intranasal, oral, eye, lung, vaginal, or rectal surface, such as by an aerosol spray.

[0211] The subjects can be mammals or birds. The subject can also be a human. An immunologically effective amount of the immunogenic composition in an appropriate number of doses is administered to the subject to elicit an immune response. Immunologically effective amount, as used herein, means the administration of that amount to a mammalian host (preferably human), either in a single dose or as part of a series of doses, sufficient to at least cause the immune system of the individual treated to generate a response that reduces the clinical impact of the bacterial infection. Protection may be conferred by a single dose of the immunogenic composition, or may require the administration of several doses, in addition to booster doses at later times to maintain protection. This may range from a minimal decrease in bacterial burden to prevention of the infection. Ideally, the treated individual will not exhibit the more serious clinical manifestations of the β-hemolytic streptococcal infection. The dosage amount can vary depending upon specific conditions of the individual, such as age and weight. This amount can be determined in routine trials by means known to those skilled in the art.

[0212] Various tests are used to assess the in vitro immunogenicity of the polypeptides of the invention. For example, the polypeptides can be expressed recombinantly or chemically synthesized and used to screen subject sera by immunoblot. A positive reaction between the subject and subject serum indicates that the subject has previously mounted an immune response to the polypeptide in question, i.e., the polypeptide is an immunogen. This method can also be used to identify immunodominant polypeptides.

[0213] An ELISA assay is also used to assess in vitro immunogenicity, wherein the polypeptide antigen of interest is coated onto a plate, such as a 96 well plate, and test sera from either a vaccinated or naturally exposed animal (e.g., human) is reacted with the coating antigen. If any antibody, specific for the test polypeptide antigen, is present, it can be detected by standard methods known to one skilled in the art.

[0214] Alternatively, the same sera can be reacted with whole Streptococcus pyogenes cells. Reactive antibody present in the sera can then be detected using a colloidal gold conjugated antibody and visualized by LV-SEM.

[0215] Efficacy of vaccine antigens can be tested using two animal challenge assay models. The first addresses mucosal immunity. Mice are actively immunized, parenterally or mucosally, with the vaccine candidates following established procedures. The mice are then challenged with wild-type Streptococcus pyogenes by intranasal administration. Streptococcus pyogenes persistence in the nasal/pharyngeal cavity of the mice can then be measured by standard techniques. Efficacy is reflected by an enhanced clearance of the bacteria from the throats of the animals.

[0216] Alternatively, subsequent to active parenteral immunization, protection against systemic infection can be evaluated by subcutaneous injection of Streptococcus pyogenes cells. Efficacy is measured by reduction in death and/or reduced histopathology at the site of injection.

[0217] Detection in a Sample

[0218] Also provided are methods for detecting and identifying β-hemolytic streptococcus and Streptococci pyogenes in a biological sample. In one embodiment, the method comprises the steps of (a) contacting the biological sample with a polynucleotide of the invention under conditions that permit hybridization of complementary base pairs and (b) detecting the presence of hybridization complexes in the sample. In another embodiment, the method comprises the steps of (a) contacting the biological sample with an antibody of the invention under conditions suitable for the formation of immune complexes and (b) detecting the presence of immune complexes in the sample. In yet another embodiment, the method comprises the steps of (a) contacting the biological sample with a polypeptide of the invention under conditions suitable for the formation of immune complexes and (b) detecting the presence of immune complexes in the sample.

[0219] Antigens, or antigenic fragments thereof, of the invention are used in immunoassays to detect antibody levels or, conversely, anti-Streptococcus pyogenes antibodies are used to detect antigen levels. Immunoassays based on well defined, recombinant antigens can be developed to replace invasive diagnostic methods. Antibodies to the polypeptides of the invention within biological samples, including, for example, blood or serum samples, can be detected. Protocols for the immunoassay may be based, for example, upon competition, or direct reaction, or sandwich type assays. Protocols may also, for example, use solid supports, or may be by immunoprecipitation. The polypeptides of the invention can also be a useful in receptor-ligand studies.

[0220] The following examples are illustrative and the present invention is not intended to be limited thereto.

### EXAMPLE 1

[0221] Bacteria, Media, and Reagents

[0222] E. coli was cultured and maintained in SOB (0.5% Yeast Extract, 2.0% Tryp, 10 mM Sodium Chloride, 2.5 mM Potassium Chloride, 10 mM Magnesium Chloride, 10 mM Magnesium Sulfate)containing the appropriate antibiotic. Ampicillin was used at a concentration of 100 μg/mL, chloramphenicol at 30 μg/mL, and kanamycin at 50 μg/mL. The Streptococcus pyogenes strain SF370 (ATCC accession number 700294) was cultured in 30 g/L Todd Hewitt, 5 g/L yeast extract (THY) broth.

[0223] Bioinformatics/Gene Mining

[0224] The genomic, unannotated sequence of Streptococcus pyogenes M1 strain was downloaded from the website of the University of Oklahoma and was analyzed to identify open reading frames (ORFs). This genomic sequence was reported as being submitted to GenBank and assigned accession number AE004092, and strain M1 GAS was reported as being submitted to the ATCC and given accession number ATCC 700294.

[0225] An ORF was defined as having either one of three potential start site codons, ATG, GTG, or TTG and either one of three potential stop codons, TAA, TAG, TGA. A unique set of three ORF finder algorithms was used to enhance the efficiency for determining all ORFs: GLIMMER (59); GeneMark (34); and a third algorithm developed by inventor's assignee.

[0226] In order to evaluate the accuracy of the ORFs determined, a discrete mathematical cosine function, known in the art has a discrete cosine transformation (DiCTion), was employed to assign a score for each ORF. An ORF with a DiCTion score >1.5 is considered to have a high probability of encoding a protein product. The minimum length of an ORF predicted by the three ORF finding algorithms was set to 225 nucleotides (including stop codon) which would encode a protein of 74 amino acids.

[0227] As a final search for remnants of ORFs, all noncoding regions >75 nucleotides were searched against the public protein databases (described below) using tBLASTn. This helped to identify regions of genes that contained frameshifts (42) or fragments of genes that might have a role in causing antigenic variation (21). Any remnant ORFs found here were added to the ORF database of Streptococcus pyogenes. An in-house graphical analysis program was used to show all six reading frames and the location of the predicted ORFs relative to the genomic sequence. This helped to eliminate those ORFs that had large overlaps with other ORFs, although there are known cases of ORFs being totally embedded within other ORFs (25, 33).

[0228] The initial annotation of the Streptococcus pyogenes ORFs was performed using the BLAST v. 2.0 Gapped search algorithm, BLASTp, to identify homologous sequences. A cutoff “e” value of anything <e⁻¹⁰ was considered significant. Other search algorithms, including FASTA and PSI-BLAST, were also used. The non-redundant protein sequence databases used for the homology searches consisted of GenBank, SWISS-PROT, PIR, and TREMBL database sequences updated daily. ORFs with a BLASTp result of >e⁻¹⁰ were considered to be unique to Streptococcus pyogenes.

[0229] A keyword search of the entire Blast results was carried out using known or suspected vaccine target genes as well as words that identified the location of a protein or function. Additionally, a keyword search was performed of all MEDLINE references associated with the initial Blast results to look for additional information regarding the ORFs.

[0230] For DNA analysis, the % G+C content within each gene was identified. The % G+C content of an ORF was calculated as the (G+C) content of the third nucleotide position of all the codons within an ORF. The value reported was the difference of this value from the arithmetic mean of such values obtained for all ORFs found in the organism. Any absolute value >8 was considered important for further analysis, as these ORFs may have arisen from horizontal transfer as has been shown in the case of cag pathogenicity island from H. pylori (2), a pattern in keeping with many other pathogenicity islands (22).

[0231] Several parameters were used to determine partitioning of the predicted proteins. Proteins destined for translocation across the cytoplasmic membrane encode a leader signal (also called signal sequence) composed of a central hydrophobic region flanked at the N-terminus by positively charged residues (56). The program SignalP was used to identify signal peptides and their cleavage sites (46). To predict protein localization in bacteria, the software PSORT was used (44). This program uses a neural net algorithm to predict localization of proteins to the cytoplasm, periplasm, and cytoplasmic membrane for Gram-positive bacteria as well as outer membrane for Gram-negative bacteria. Transmembrane (TM) domains of proteins were analyzed using the software program TopPred2 (10). This program predicts regions of a protein that are hydrophobic that may potentially span the lipid bilayer of the membrane. Outer membrane proteins typically do not have an α-helical TM domain.

[0232] The Hidden Markov Model (HMM) Pfam database of multiple alignments of protein domains or conserved protein regions (61) was used to identify Streptococcus pyogenes proteins that may belong to an existing protein family. Keyword searching of this output was used to help identify surface localized Streptococcus pyogenes proteins that might have been missed by the Blast search criteria HMM models were also developed by inventor's assignee. A computer algorithm, HMM Lipo, was developed to predict lipoproteins using 132 biologically characterized non-Streptococcus pyogenes bacterial lipoproteins from over 30 organisms. This training set was generated from experimentally proven prokaryotic lipoproteins. The protein sequence from the start of the protein to the cysteine amino acid plus the next two additional amino acids were used to generate the HMM. Using about 70 known prokaryotic proteins containing the LPXTG cell wall sorting signal, a HMM (15) was developed to predict cell wall proteins that are anchored to the peptidoglycan layer (38, 45). The model used not only the LPXTG sequence, but also included two features of the downstream sequence, the hydrophobic transmembrane domain and the positively charged carboxy terminus. There are also a number of proteins that interact, noncovalently, with the peptidoglycan layer and are distinct from the LPXTG protein class described above. These proteins seem to have a consensus sequence at their carboxy terminus (32). A HMM of this region was developed and used to identify Streptococcus pyogenes proteins falling into this class.

[0233] The proteins encoded by Streptococcus pyogenes identified ORFs were also evaluated for other characteristics. A tandem repeat finder (5) identified ORFs containing repeated DNA sequences such as those found in MSCRAMMs (20) and phase variable surface proteins of Neisseria meningitidis (51). Proteins that contain the Arg-Gly-Asp (RGD) attachment motif, together with integrins that serve as their receptor, constitute a major recognition system for cell adhesion. RGD recognition is one mechanism used by microbes to gain entry into eukaryotic tissues (29, 63). However, not all RGD-containing proteins mediate cell attachment. It has been shown that RGD-containing peptides with a proline at the carboxy end (RGDP) are inactive in cell attachment assays (52) and, hence, were excluded. Geanfammer software was used to cluster proteins into homologous families (50). Preliminary analysis of the family classes provided novel ORFs within a vaccine candidate cluster as well as defining potential protein function.

[0234] Tryptic Digestion of Streptococcus pyogenes

[0235] A starter culture of Streptococcus pyogenes was grown overnight in THY at 37° C., in 5% CO₂, or in atmospheric O₂. Each starter culture was then diluted 1:25 in 200 mL fresh THY, and grown to an OD₄₉₀ of 1-1.3, in either CO₂ or atmospheric O₂, respectively. The cells were then harvested by centrifugation at 4,000×g, for 15 min., and washed three times in 10 mL 20 mM Tris, pH 8.0, 150 mM NaCl buffer. Following the last wash, each pellet was resuspended in 2 mL same buffer containing 0.8 M sucrose and distributed equally between two tubes. To one tube of each growth condition, 40 μg trypsin was added; the other tube was used as a negative digestion control. The cell suspensions were rocked at 37° C. for 4 hours. A sample of each suspension was taken for viable cell counts and visualization by low-voltage scanning electron microscopy (LV-SEM). The suspensions were then centrifuged and the supernatants were collected and filtered through a low protein binding, 2 μM filter.

[0236] Micro-Capillary HPLC Interface

[0237] Peptide extracts were analyzed on an automated microelectrospray reversed phase HPLC. The microelectrospray interface consisted of a Picofrit fused silica spray needle, 50 cm length by 75 um ID, 8 μm orifice diameter (New Objective, Cambridge Mass.) packed with 10 μm C18 reversed-phase beads (YMC, Wilmington, N.C.) to a length of 10 cm. The Picofrit needle was mounted in a fiber optic holder (Melles Griot, Irvine, Calif.) held on a base positioned at the front of the mass spectrometer detector. The rear of the column was plumbed through a titanium union to supply an electrical connection for the electrospray interface. The union was connected with a length of fused silica capillary (FSC) tubing to a FAMOS autosampler (LC-Packings, San Francisco, Calif.) that was connected to an HPLC solvent pump (ABI 140C, Perkin-Elmer, Norwalk, Conn.). The HPLC solvent pump delivered a flow of 50 μL/min. which was reduced to 250 nL/min. using a PEEK microtight splitting tee (Upchurch Scientific, Oak Harbor, Wash.), and then delivered to the autosampler using an FSC transfer line. The LC pump and autosampler were each controlled using their internal user programs. Samples were inserted into plastic autosampler vials, sealed, and injected using a 5 μl sample loop.

[0238] Microcapillary HPLC-Mass Spectrometry

[0239] Extracted peptides from the surface digests were concentrated 10-fold using a Savant Speed Vac Concentrator (ThermoQuest, Holdbrook, N.Y.), and then were separated by the microelectrospray HPLC system using a 50 min. gradient of 0-50% solvent B (A: 0.1M HoAc, B: 90% MeCN/0.1M HoAc). Peptide analyses were conducted on a Finnigan LCQ-DECA ion trap mass spectrometer (ThermoQuest, San Jose, Calif.) operating at a spray voltage of 1.5 kV, and using a heated capillary temperature of 125° C. Data were acquired in automated MS/MS mode using the data acquisition software provided with the instrument. The acquisition method included 1 MS scan (375-600 m/z) followed by MS/MS scans of the top 2 most abundant ions in the MS scan. The instrument then conducted a second MS scan (600-1000 m/z) followed by MS/MS scans of the top 2 most abundant ions in that scan. The dynamic exclusion and isotope exclusion functions were employed to increase the number of peptide ions that were analyzed (settings: 3 amu=exclusion width, 3 min.=exclusion duration, 30 sec=pre-exclusion duration, 3 amu=isotope exclusion width).

[0240] Data Analysis

[0241] Automated analysis of MS/MS data was performed using the SEQUEST computer algorithm incorporated (17) into the Finnigan Bioworks data analysis package (ThermoQuest, San Jose, Calif.) using the database of proteins derived from the complete genome of Streptococcus pyogenes.

[0242] Cloning and Protein Expression

[0243] Primer sets were designed for PCR amplification of desired ORFs such that the forward 5′ primer would anneal at the start of the predicted mature protein. For lipoproteins, the 5′ forward primer was designed to anneal just after the codon encoding a cysteine residue of the mature protein to minimize disulfide bridging. Design of the opposing reverse 3′ primers was dependent upon the type of predicted protein. For those proteins that contained an LPXTG, the primer was designed such that it would anneal at the beginning (5′ end) of the cell wall anchor region. For all other predicted proteins, they were designed such that they would anneal at the 3′ end of the ORF. Additionally, the 5′-forward primer was initially designed to allow an in-frame fusion to thioredoxin with the opposing 3′-reverse primer allowing read-through to include a downstream his-patch and V5 epitope (pBAD/thio-TOPO®, Invitrogen, Carlsbad, Calif.). The pBAD vector uses an arabinose inducible promoter. In parallel, these same PCR products were also cloned into pCRT7 TOPO® (Invitrogen, Carlsbad, California). This allowed for an N-terminal fusion to an Xpress epitope and a his-tag for purification.

[0244] All PCR reactions used the Streptococcus pyogenes M1 strain, SF370 (ATCC accession number 700294), as the template. PCR products were transformed into the E. coli host, TOP10, and plated on SOB containing 100 μg/mL ampicillin. Colonies were screened by PCR amplification using a vector specific 5′ primer and the specific 3′ reverse primer annealing to the gene insert. Colonies were seeded into wells of a 96 well microtiter plates containing 50 μL 50% glycerol. 10-12 colonies per gene were seeded in one row of the plate. In a second 96 well PCR plate, 50 μL reactions were set up specific to the gene of interest. One μL of the cells suspended in glycerol was used as template in the PCR reaction. Reactions that produced bands of the expected size were analyzed further. The cells that were seeded in 50% glycerol had SOB media added to them and were incubated at 37° C. for 5-8 hours and frozen at −70° C.

[0245] PCR positive colonies were inoculated into 2 mL cultures for overnight growth. Part of the culture was used to prepare plasmid DNA that was analyzed by restriction digest to confirm the inserts while another part was used to seed 10 mL expression cultures (for pBAD plasmids) for expression. Mid-log phase cultures were induced with 0.5% L-arabinose for 2 hours. T7/NT plasmids were transformed into the expression strain BLR(DE3) pLysS before screening. T7/NT cultures were induced by the addition of 1 mM IPTG and incubated for 2 hours. Whole cell lysates of induced cultures were run on SDS-PAGE in duplicate. One gel was stained with coomassie and the other was transferred to nitrocellulose and probed with antibody to the relevant epitope tag.

[0246] Positive clones were grown in 1-2 L volumes and induced for large-scale purification. Solubility and expression level of the recombinant proteins were assessed by freeze-thaw lysis of the cells followed by DNase/RNase digestion and centrifigation at 9,000×g for 15 min. in a RC5B refrigerated centrifuge (sorbol®, Dupont, Wilmington, De.). The soluble fraction was removed from the insoluble material and both were separated and evaluated for protein localization and expression by SDS-PAGE. Soluble fusion proteins were purified by passing the soluble fraction of lysed cells over Ni-NTA (Qiagen Inc., Valencia, Calif.) resin and eluting the bound proteins with imidazole. Eluted proteins were buffer exchanged on PD-10 columns (Amersham Pharmacia Biotech, Piscataway, N.J.).

[0247] Insoluble recombinant proteins were washed and centrifuged 3 times in PBS, 0.1% TRITON-X100. The inclusion bodies were then solubilized in PBS 4 M urea and buffer exchanged through a PD-10 column (Amersham Pharmacia, Piscataway, N.J.) into PBS, 0.01% TRITON-X100, 0.5 M NaCl. Protein was quantitated by the Lowry assay and checked for purity and concentration by SDS-PAGE.

[0248] Generation of Polyclonal Antisera

[0249] Swiss Webster mice (5 per group) were immunized at weeks 0, 3, and 5 with 5 μg purified protein prepared above, 100 μg AlPO₄, and 50 μg MPL®, and were then bled at week 8.

[0250] Immunogold Labeling of Streptococcus pyogenes and LV-SEM

[0251] Bacterial cells were labeled as previously described (49). Briefly, late-log phase bacterial cultures were washed twice, and resuspended to a concentration of 1×10⁸ cells/ml in 10 mM phosphate buffered saline (PBS) (pH 7.4) and placed on poly-L-lysine coated glass coverslips. Excess bacteria were gently washed from the coverslips and unlabeled samples were placed into fixative (2.0% glutaraldehyde, in a 0.1 M sodium cacodylate buffer containing 7.5% sucrose) for 30 min. Bacteria to be labeled with colloidal gold were washed with PBS containing 0.5% bovine serum albumin, and the pre-immune or hyper-immune mouse polyclonal antibody prepared above was applied for 1 hour at room temperature. Bacteria were then gently washed, and a 1:6 dilution of goat anti-mouse conjugated to 18 nm colloidal gold particles (Jackson ImmunoResearch Laboratories, Inc., West Grove, Pa.) was applied for 10 min. at room temperature. Finally, all samples were washed gently with PBS, and placed into the fixative described above. The fixative was washed from samples twice for 10 min. in 0.1 M sodium cacodylate buffer, and postfixed for 30 min. in 0.1 M sodium cacodylate containing 1% osmium tetroxide. The samples were then washed twice with 0.1 M sodium cacodylate, dehydrated with ethanol, critical point dried by the CO₂ method of Anderson using a Samdri-780A (Tousimis, Rockville, Md.), and coated with a 1-2 nm discontinuous layer of platinum. Streptococcus pyogenes cells were viewed with a LEO 1550 field emission scanning electron microscope operated at low accelerating voltages (1-4.5 keV) using a secondary electron detector for conventional topographical imaging and a high-resolution Robinson backscatter detector to enhance the visualization of colloidal gold by atomic number contrast.

### EXAMPLE 2

[0252] Immunization and Challenge

[0253] Parenteral Immunization of Mice

[0254] Six-week old, female CD1 (Charles River Breeding Laboratories, Inc., Wilmington, Mass.) or Swiss Webster (Taconic Farms Inc., Germantown, N.Y.) mice are immunized at weeks 0, 4, and 6 with 5 μg protein of interest mixed with 50 μg MPL® (Corixa, Hamilton, Mont.) and 100 μg AlPO₄ per dose to a final volume of 200 μL in saline and then injected subcutaneously (s.c.) into mice. Control mice are injected with 5 μg tetanus toxoid mixed with same adjuvants. All mice are bled seven days after the last boosting; sera are then isolated and stored at −20° C.

[0255] Mouse Intranasal Challenge Model

[0256] Ten days after last immunization, sixteen-hour cultures of challenge Streptococcus pyogenes strains (1×10⁸ to 9×10⁸ colony forming units (CFU)), grown in Todd-Hewitt/Yeast broth containing 20% normal rabbit serum and resuspended in 10 ml of PBS, are administered intranasally to 25 g female CD1 (Charles River Breeding Laboratories, Inc., Wilmington, Mass.) or Swiss Webster (Taconic Farms Inc., Germantown, N.Y.) mice. Viable counts are determined by plating dilutions of cultures on blood agar plates.

[0257] Each mouse is anesthetized with 1.2 mg of ketamine HCl (Fort Dodge Animal Health, Ft. Dodge, Iowa) by i.p. injection. The bacterial suspension is inoculated to the nostril of anesthetized mice (10 μL per mouse). Sixteen hours after challenge, mice are sacrificed, the noses are removed and homogenized in 3-ml sterile saline with a tissue homogenizer (Ultra-Turax T25, Janke & Kunkel Ika-Labortechnik, Staufen, Germany). The homogenate is 10-fold serially diluted in saline and plated onto blood agar plates containing 200 mg of streptomycin per ml. After overnight incubation at 37° C., β-hemolytic colonies on plates are counted. All challenge strains are marked by streptomycin resistance to distinguish them from β-hemolytic bacteria that may persist in the normal flora.

[0258] Subcutaneous Mouse Challenge Model

[0259] Five-week-old (20- to 30-g) outbred, immunocompetent, hairless male mice (strain Cr1:SKH1-hrBR) (Charles River, Wilmington, Mass.) are used for subcutaneous injection. Tissue samples are collected following humane euthanasia.

[0260] Streptococcus pyogenes cells, grown as described in Example 1, are harvested and washed once with sterile ice-cold, pyrogen-free phosphate-buffered saline (PBS). The optical density at 600 nm (OD₆₀₀) is adjusted to give the required inoculum. Streptococcus pyogenes (1×10⁸ CFU) contained in 0.1 ml are injected subcutaneously in the right flank of each animal with a tuberculin syringe. Control mice are treated with the same volume of PBS. The number of CFU inoculated per mouse is verified for each experiment by colony counts on tryptose agar plates containing 5% sheep blood (Becton Dickinson, Cockeysville, Md.). The mice are observed for 21 days after challenge. Blood is collected from each dead animal by cardiac puncture and cultured on blood agar plates.

[0261] Tissue Collection and Histology

[0262] Prior to inoculation, the animals are assigned to groups with a random number generator, and blood samples are drawn to establish baseline hematologic data. Blood and tissue samples are collected at 24, 48, and 72 h after inoculation. The methods used for blood and tissue collection are identical for all time points.

[0263] Blood samples are obtained from the retro-orbital sinus of the animals, and complete blood count analysis is performed with a Technicon H*1 I(Tarrytown, N.Y.) hematology analyzer with species-specific software. Skin samples are collected by wide marginal excision around the abscess or the injection site. These samples always include tissue from the injection site and contiguous grossly normal tissue for comparison. Care is taken to preserve the anatomic orientation of the samples. Tissue samples are also obtained from the heart, liver, spleen, and lung.

[0264] All tissues are fixed in 10% neutral buffered formalin supplemented with zinc chloride (Antech, Ltd., Battle Creek, Mich.). Whole lungs are first infused with formalin and then, along with the other organs, fixed by submersion. The samples are placed in formalin for 18 to 24 h and then transferred to 70% ethyl alcohol prior to processing. Standard histologic methods of dehydration in ascending grades of ethyl alcohol, clearing in xylene, and paraffin infiltration are employed. The paraffin blocks are processed with a rotary microtome to obtain 4-μm sections. The histologic sections are stained with hematoxylin and eosin and mounted. Selected tissues are sectioned and stained with a tissue Gram stain.

[0265] Mouse Measurements

[0266] Mice are weighed immediately before GAS inoculation. The animal weight and abscess sizes are measured 12 h after inoculation and daily thereafter for the first week. Animals are then observed at weekly intervals for a total of 21 days. The dimensions of the abscesses are measured with a caliper; length (L) and width (W) values were used to calculate abscess volume [V=4/3π(L/2)²×(W/2)] and area [A=π(L/2)×(W/2)], employing equations for a spherical ellipsoid.

### EXAMPLE 3

[0267] Seventy-seven ORFs were initially selected for characterization by “wet chemistry”. Aspects of these studies included: 1) the ability of specific mouse polyclonal sera generated against each purified protein to react to the surface of the bacterium as measured by whole-cell ELISA, 2) the ability of these same sera to react to the bacterial cell surface during log phase or stationary phase growth as determined by LV-SEM, 3) the genetic conservation of the genes across strains (M serotypes) of S. pyogenes as well as other species of streptococci that include the groups C and G, 4) phenotypic expression of specific proteins by these strains as determined by dot blot, 5) expression of the genes of interest at the transcriptional level by quantitative PCR (qPCR), and 6) the ability of human antibody to these proteins to be opsonic in an in vitro opsonophagocytic assay.

[0268] Seventy-four of the ORFs have been cloned and expressed in E. coli, and 62 of the expressed proteins have been purified. These purified proteins were injected into mice for the generation of the specific antibody for which the analysis by whole-cell ELISA and LV-SEM has been completed. Additionally, 24 ORFs have been evaluated for genetic conservation across S. pyogenes strains and streptococcal species; a few have been evaluated for expression at the transcriptional level by qPCR in vitro and in vivo. Lastly, human antibody specific for S. pyogenes proteins has been purified and evaluated in opsonophagocytic assays.

[0269] Whole-Cell Enzyme-Linked Immunosorbent Assay (ELISA)

[0270] S. pyogenes strain SF-370 was used to inoculate Todd-Hewitt broth containing 0.5% yeast extract (THY), and was cultured overnight at 37° C. Cells were harvested by centrifugation and washed two times with phosphate buffered saline (PBS). The bacteria were resuspended in PBS to an OD₆₀₀ of 0.2 with PBS and each well of a 96 well polystyrene microtiter plate was coated with 100 μl of the bacterial suspension. The plates were then air-dried at room temperature, sealed with a mylar plate sealer and stored at 4° C. inverted for up to three months. In preparation for the assay, the plates were washed three times with Tris Buffered Saline (TBS)/0.1% Brij-35, 100 μl/well of ORF-specific antisera was added to each well, and incubated at 37° C. for two hours. The plates were then washed three times with TBS/0.1% Brij-35, 100 μl/well of the secondary antibody conjugate was added to each well, and incubated for one hour at room temperature. Finally, after three washes with PBS, 100 μl/well of the substrate was added to each well and allowed to develop for 60 minutes at room temperature. The reaction was then stopped by adding 50 μl/well of 3N NaOH. Absorbance values (OD₄₀₅) were determined using an ELISA plate reader.

[0271] Polymerase Chain Reaction (PCR) Analysis of Genetic Conservation.

[0272] The bacterial strains tested included ten from S. pyogenes , SF370 (M1), 90-226 (M1), 80-003 (M1), CS210 (M2), CS194 (M4), 83-112 (M5), CS204 (OF+, M11, T11), CS24 (M12), 95-0061 (M28), CS101 (M49), and a fourth M1 serotype SpeB+, two S. zooepidemicus strains, CS258 and GB21, and three group G streptococcal strains, CS241, CS140, and CS242. Five ml overnight cultures were grown in THY. Two and one/half ml of each culture were centrifuged and resuspended in 480 μl of 50 mM EDTA, 120 μl of 10 mg/ml lysozyme and 2 μl of 2500 unit/ml mutanolysin. Samples were incubated at 37° C. for one hour. Promega's Wizard Genomic DNA Purification Kit was followed for the remainder of the genomic purifications. Primer sets for the full-length genes and secondly, primers designed for qPCR (see below) were used in the assay. PCR cycling conditions are as follows: 94° C. hold for one minute, 16 cycles of 94° C. for 15 seconds and 58° C. for 10 min, 12 cycles, each increasing 15 seconds from the previous, of 94° C. for 15 seconds and 58° C. for 10 min, a ten minute hold at 72° C., and finally a 4° C. hold. PCR products were verified by mobility in agarose gels. Any amplification containing an intense band of the appropriate size was considered to be a positive result.

[0273] Quantitative PCR (qPCR)

[0274] RNA was isolated from bacterial cultures described above or from infected homogenized mouse tissue. Samples were suspended in 2 ml RNAlater (Ambion, Austin, Tex., USA) and quick-frozen using dry-ice/ethanol and stored at −70° C. until use. Samples were thawed to room temperature and then frozen again using the above method, for a total of three freeze-thaw cycles. Samples were either treated with 100 μl 10mg/ml lysozyme and 10 μl 2500 unit/ml mutanolysin, and incubated at 37° C. for one hour, or samples were mixed with an equal volume of 0.1 mm glass beads and placed into the bead beater for one minute at 4800 rpm to lyse the cells. Supernatant was recovered from the beads and an additional 400 μl RNAlater was added to the beads and mixed as above. Supernatants recovered from beads or digested solution were mixed with an equal volume of RNAqueous Lysis/Binding Solution (Ambion) and vortexed vigorously. Samples were spun at top speed in a microcentrifuge for two minutes to pellet any remaining tissue. The supernatants were mixed with an equal volume of 64% ethanol and passed through a filter cartridge, 700 μl at a time. Filter cartridges were washed as described in the RNAqueous manual. Samples were eluted using 2×25 μl 95° C. Elution Solution. Two, 1.5 μl DNase treatments were performed for one hr each at 37° C. using DNA-free (Ambion) to remove any genomic contamination. Twenty μl of purified RNA was used in 40 μl final volume RT reaction with heat denaturation as described in RETROscript (Ambion) protocol to generate cDNA. Samples were denatured at 85° C., and reverse transcribed by incubating for one hour at 42° C., followed by a ten minute incubation at 92° C.

[0275] Quantitative PCR was performed using primers and probes, specific to each ORF, designed using Primer Express software (Applied Biosystems, Foster City, Calif., USA). Twenty-five μl reactions were set up using 2× Taqman Universal PCR Master Mix (Applied Biosystems), 300 nM forward primer, 300 nM reverse primer, 200 nM FAM/TAMRA probe, and cDNA template. PCR reaction was as follows: 50° C. for 2 min, 95° C. for 10 min, 40 cycles of 95° C. for 15 seconds and 60° C. for one minute. Ribosomal 16S RNA is used as an internal control, with all results being normalized to the 16S Ct value. Based upon results from a standard curve, the cDNA added to these wells was diluted 100 fold to produce a Ct value similar to ORFs of interest.

[0276] Purification of Human Polymorphonuclear Leukocytes (PMN).

[0277] PMNs were purified from a pool of human whole blood from four donors using a Percoll gradient. A three-layer gradient was prepared by diluting Percoll in Hank's Balanced Salt Solution (HBSS). The densest phase was 2.7:1, middle was 1.079:1 and upper phase 1.07:1, Percoll:HBSS respectively. A ten ml volume of whole blood was layered onto the gradient and centrifuged at 2600 RPM for 20 minutes at 20° C. The upper layers were removed, washed in PBS with glucose to remove Percoll, centrifuged and resuspended in sterile water to lyse red blood cells. A twenty-fold concentrated solution of normal saline was added to equilibrate, re-centrifuged to remove lysed cells, the PMNs were resuspended and counted. The cells were diluted into PBS containing calcium and magnesium and brought to 37° C. before use.

[0278] Blot Analysis of ORF Specific Antibodies From Human Sera.

[0279] Two μg of protein were coated onto nitrocellulose and allowed to air dry for 15 minutes. The blot was incubated in BLOTTO for 30 minutes at room temperature and then incubated with 5 ml of pooled human serum plasma at 4° C. for 16 hours. The nitrocellulose was rinsed in PBS with 0.2% Tween 20 and incubated with goat anti-human IgG conjugated to alkaline phosphatase for two hr at room temperature. The blot was re-washed and developed in NBT/BCIP substrate.

[0280] Affinity Purification of Human Antibodies.

[0281] One hundred μg of each S. pyogenes purified protein was allowed to adhere to a strip of nitrocellulose, blocked for 15 minutes with 5% BLOTTO and then rinsed with PBS. After the sera was adsorbed overnight at 4° C., the nitrocellulose strip was washed with PBS and rinsed with 100 mM glycine at pH 3.0 to elute bound antibodies. The eluted antibodies were neutralized with 1 M Tris pH 8.8 and dialyzed in PBS. These antibodies were tested with PMNs and human whole blood for OPA to the SF-370 strain.

[0282] Opsonophagocytic Assay (OPA).

[0283] S. pyogenes strain SF-370 was used to inoculate THY broth and grown static overnight. The overnight cultures were diluted into fresh medium and further cultured to an OD₆₅₀ of 0.5-0.7. The cells were centrifuged, washed 1× with PBS and resuspended in ice cold PBS to an OD₆₅₀ of 0.5. The cells were diluted to 1:5,000 in PBS and mixed with test antibody or antiserum for 30 min at 4° C. Pre-warmed PMNs were added to the bacteria and antibody at a ratios of 100 and 200 effector cells per target cell. The reactions were incubated at 37° C. for one hr on a rocker and finally stopped with ice cold PBS and plated in duplicate on BHI agar.

[0284] OPA Using Whole Human Blood.

[0285] Individual heparin-treated human blood was obtained and incubated at 37° C. for 15-30 min until used. Bacteria were prepared as described, and incubated with 50 μl test antibody at 4° C. for 15 min, then 430 μl of whole blood were added. The reactions were incubated for 1.5 hr at 37° C. on rocker and plated in duplicate on BHI agar. Each experiment represents an individual person's whole blood sample, not a pool.

[0286] Results

[0287] Whole Cell ELISA.

[0288] The ability of ORF-specific antibody to react to the surface of whole cells was tested by ELISA. The antibody was produced in mice as described previously. Reactivity demonstrates differences in the amount of protein expressed on the surface of the S. pyogenes cells and/or the exposure of the protein in a manner that allows for antibody to bind. ELISA titers are shown in Table XV and indicate a range of reactivities reflective of the differences in either amount of protein expressed or number of epitopes exposed to allow for antibody reactivity. Values well above preimmune background titers are in bold face type.

TABLE XV
Whole cell ELISA titer to S. pyogenes ORFs.

| Orf # | ELISA Titer |
|---|---|
| 68 | 1,635 |
| 73 | 1,702 |
| 145 | 2,105 |
| 218 | 1,139 |
| 232 | 1,277 |
| 309 | 1,456 |
| 347 | 2,766 |
| 433 | 1,431 |
| 554 | 22,873 |
| 661 | 1,727 |
| 668 | 1,869 |
| 678 | 2,144 |
| 685 | 3,094 |
| 704 | 1,716 |
| 721 | 680 |
| 729 | 1,381 |
| 747 | 11,733 |
| 850 | 4,861 |
| 967 | 4,823 |
| 1157 | 1,827 |
| 1191 | 1,248 |
| 1202b | 1,194 |
| 1218 | 220,289 |
| 1224 | 21,170 |
| 1284 | 1,374 |
| 1316 | 6,407 |
| 1358 | 6,201 |
| 1487 | 4,007 |
| 1659 | 3,240 |
| 1664 | 5,355 |
| 1698 | 2,032 |
| 1723 | 1,273 |
| 1788 | 3,324 |
| 1789 | 1,475 |
| 1818 | 40,271 |
| 1820 | 2,498 |
| 1878 | 895 |
| 1983 | 1,179 |
| 2015 | 1,800 |
| 2019 | 24,669 |
| 2064 | 1,486 |
| 2258 | 4,962 |
| 2379 | 19,220 |
| 2417 | 4,225 |
| 2450 | 4,255 |
| 2452 | 2,256 |
| 2459 | 2,166 |
| 2477 | 5,412 |
| 2497 | 666 |
| 2593 | 8,602 |
| 2601 | 2,000 |

[0289] Gene Conservation

[0290] PCR analysis of several streptococcal strains was performed to determine the extent of conservation of the various ORFs. The results from this analysis can be seen in FIG. 11. All PCR products were analyzed by gel electrophoresis and the band size compared to the predicted value. All ORFs indicated as positive showed a PCR product migrating at the predicted size. The data show a high degree of genomic conservation, with 21 out of 24 ORFs tested being conserved across all eleven strains of S. pyogenes . Additionally, 18 were conserved amongst groups C and G; the lowest amount of conservation was observed in the strains of group B streptococci.

[0291] Quantitative PCR of Selected S. pyogenes ORFs.

[0292] Quantitative PCR was performed to verify transcription of several ORFs contained in the S. pyogenes genome. Further, this method was used as a means to verify gene expression in vivo in a simulated infection model. Two known transcriptional regulators, rofA and Mga, and one other housekeeping gene, gyrA, were included as additional controls. All genes tested were expressed, and depending on conditions, some showed a variation in levels of transcription. The values are expressed in Ct numbers, which indicate at which PCR cycle the amplification was detectable above background. Thus, a lower Ct value indicates that a greater amount of mRNA was present in the starting material. A Ct difference of one correlates to a two-fold difference in the amount mRNA detected. FIG. 12 shows the results of this analysis. All ORFs showed a significantly lower Ct value than the no template control. ORF 2019 showed a 155-fold lower expression in the thigh than that observed in either the lung or in vitro culture. ORF 2477, on the other hand, showed a 49-fold increase, relative to the thigh or in vitro culture, in mRNA levels when extracted from the lung after 8 hours of infection. These data show that all ORFs tested were transcribed in vitro and in vivo and were influenced by the conditions in which the bacteria are exposed.

[0293] Reactivity of Human Sera to S. pyogenes proteins.

[0294] Antibodies were purified from human sera to test the ability of ORF specific antibody to enhance the ability of PMNs to engulf and kill S. pyogenes. Figure shows the reactivity of human serum to several S. pyogenes proteins by dot blot indicating that this serum is suitable as a source of antibodies for opsonophagocytic studies. Table XVI summarizes the results of these blots. The results of the blot indicate that 14 of the 24 ORF proteins tested positive for reactivity with human serum. In a similar experiment, a single human serum was tested against the proteins and the results were identical to the ones shown in Table XVI. Several of the proteins were selected for use in the affinity purified antibody studies based on their reactivity and quantity of available material.

TABLE XVI
ORF identification for reactive proteins.

| | A | B | C | D | E | F | G | H |
|---|---|---|---|---|---|---|---|---|
| 1 | ScpA | 145 | 232 | 554 | 668 | 721 | 1224 | 1284 |
| 2 | 2452 | 1659 | 1698 | 1788 | 1818 | 1820 | 2379 | 2459 |
| 3 | 2477 | 2593 | 2601 | 1218 | 433 | 1358 | 2019 | 1664 |

Notes:
Bold = positive

[0295] Opsonophagocytic Activity of Affinity Purified Human Anti-ORF Antibodies With Purified PMNs.

[0296] PMNs were purified from a pool of four human blood samples and the growth of S. pyogenes SF-370 were as described above. Bacteria, PBS diluent and PMNs served as a negative control. The percent killing was calculated by dividing CFUs recovered from reaction containing test antibody with CFUs recovered from the reaction containing that of the negative control. The results of these studies, summarized in Table XVII, indicate that the affinity-purified antibodies have opsonic activity to SF-370 when incubated with purified PMNs. In particular, antibodies to ScpA and ORF 1224 resulted in greater than 50% killing as measured in OPA verses negative control all three times they were tested.

TABLE XVII
Opsonophagocytic activity of affinity purified human antibodies
to S. pyogenes proteins with purified PMNs as effector cells.

Opsonophagocytic Killing of
ORF Antibodies (Percent)¹

| | ScpA | 1224 | 1218 | 145 | 2459 | 1698 |
|---|---|---|---|---|---|---|
| Exp. #1 | 60 | 64 | 63 | ND | ND | ND |
| Exp. #2 | 65 | 53 | 59 | ND | ND | ND |
| Exp. #3 | 62 | 85 | 45 | 71 | 31 | 61 |
| Avg. | 62.3 | 67.3 | 55.7 | 71 | 31 | 61 |

¹Opsonophagocytic activity as compared to negative control. Ratio of PMNs to bacteria was 100:1. Affinity purified antibody was 10% of the reaction mixture (1:10 dilution).
ND = No data.

[0297] Opsonophagocytic Activity of Affinity Purified Human Antibodies Using Whole Blood.

[0298] Traditional OPAs with S. pyogenes have utilized whole blood as the source of effector cells.

[0299] Experiments were conducted to determine if the affinity-purified antibodies had opsonic activity in the presence of whole blood. The results are summarized in Table XVIII and show variable results depending on the individual whose blood was used as a source for PMNs. However, antibodies to ORF1224 and 145 gave consistently greater OPA titers with all seven of the individual blood samples tested. In contrast, antibodies to ScpA generated consistently poor OPA titers with all seven blood samples. This was unexpected because when antibodies to ScpA were tested with PMNs there was greater than 50% killing in 3 of 3 assays. Antibodies to the five other proteins had less consistent OPA against S. pyogenes SF-370 to the homologous strain. It should be noted that antibodies to ORF 1284 generated greater than 50% killing in 4 of 7 experiments.

TABLE XVIII
OPA using whole blood as source of effector cells.

| | Opsonophagocytic Killing of ORF Antibodies (Percent)¹ | | | | | | | |
|---|---|---|---|---|---|---|---|---|
| Person | ScpA | 145 | 1224 | 1284 | 1698 | 1818 | 2459 | 1218 |
| 1 | 16 | 77 | 86 | 60 | 56 | 45 | 82 | 56 |
| 2 | 36 | 50 | 79 | 86 | 68 | 72 | 64 | 28 |
| 3 | 16 | 47 | 56 | 53 | 39 | 42 | 66 | 33 |
| 4 | 14 | 48 | 54 | 41 | 25 | 63 | 62 | 33 |
| 5 | 19 | 69 | 56 | 35 | 63 | 42 | 19 | 42 |
| 6 | 7 | 57 | 68 | 54 | 62 | 54 | 65 | 36 |
| 7 | 5 | 64 | 59 | 42 | 33 | 38 | 19 | 16 |
| Mean | 14 | 58 | 64 | 51 | 32 | 50 | 47 | 33 |
| Std Dev | 10 | 12 | 13 | 17 | 20 | 13 | 25 | 12 |

¹Opsonophagocytic activity as compared to reaction containing whole blood, bacteria and PBS.

### EXAMPLE 4

[0300] Biological Activities of Streptococcal Pyrogenic Exotoxin I

[0301] A study was undertaken to characterize SPE I with regard to biological activities. The data indicate that SPE I has superantigen activity and nonspecifically induces proliferation of T cells displaying T cell receptor Vβ regions (TCR Vβ) 6.7,9, and 21.3.

[0302] SPEI

[0303] SPE I was purified by combinations of isoelectric focusing and affinity chromatography. The purified toxin was shown to be homogeneous by sodium dodecyl sulfate polyacrylamide gel electrophoresis.

[0304] Superantigenicity Assay

[0305] Rabbit splenocytes were seeded into the wells of a 96 well microtiter plate at a concentration of 2×10⁵ cells per well. Ten fold dilutions of toxin were added to wells in quadruplicate, starting with 1.0 ug/well down to 10⁻⁸ ug/well. These dilutions were compared to cells incubated in the presence of PBS alone as a negative control and other SPEs as positive controls. The splenocytes were grown at 37° C. for 3 days, and pulsed with 1 uCi ³H-thymidine overnight. The cells were harvested the next day, and cell proliferation, as determined by ³H-thymidine incorporation into DNA, was measured in a scintillation counter (Beckman Instruments, Fullerton, Calif.).

[0306] Flow Cytometric Analysis of T Cell Repertoire

[0307] Peripheral blood mononuclear cells (PBMC) obtained from 3 normal human donors were isolated from heparinized venous blood by density gradient sedimentation over Ficoll-Hypaque (Histopaque, Sigma). Cells were then washed three times in Hank's balanced salt solution (HBSS) (Mediatech Cellgro, Herndon, Va.) and resuspended in medium for cell culture. PBMC (at 1×10⁶ cells/ml) were cultured in RPMI 1640 (Mediatech Cellgro) supplemented with 10% heat inactivated fetal calf serum (FCS) (Gemini Bioproducts, Woodland, Calif.), 20 mM HEPES buffer (Mediatech Cellgro), 100 u/ml penicillin (Mediatech Cellgro), 100 ug/ml streptomycin (Mediatech Cellgro), and 2 mM L glutamine (Mediatech Cellgro). Cells were cultured in the presence of either anti-CD3 (20ng/ml), or SPE I (100 ng/ml) for 3 days, washed and allowed to grow for an additional day in the presence of interleukin 2 (50 U/ml) before washing and staining for immunofluoresence analysis of T cell repertoire as previous described.

[0308] For flow cytometry studies, PBMC were washed in HBSS and resuspended at 10×10⁶ cells/ml in a staining solution [PBS with 5% FCS (Gemini Bioproducts), 1% immunoglobulin (Alpha Therapeutic Corp., Los Angeles, Calif.), 0.02% sodium azide (Sigma)]. Cells were stained in 96 well, round bottomed plates with a panel of biotinylated monoclonal antibodies against human TCRVβ 2, 3, 5.1, 5.2, 7, 8, 11, 12, 13.1, 13.2, 14, 16, 17, 20, 21.3, 22 (Immunotech, Westbrook, Me.), TCRVβ 9, 23 (Pharmingen, San Diego, Calif.) and TCRVβ 6.7 fluorescein isothiocyanate (FITC) (Endogen, Woburn, Mass.), then incubated for 30 min at 37° C. in the dark. After the incubation period, cells were washed twice with washing buffer [PBS, 2% FCS (Gemini Bioproducts), 0.02% sodium azide (Sigma)] by centrifugation at 300×g for 5 min at 4° C. Cell pellets were resuspended in staining solution and incubated with anti-CD3 allophycocyanin (APC), anti-CD4 phycoerythrin (PE) (Becton Dickinson, San Jose, Calif.), anti-CD8 (FITC) (Becton Dickinson) and a streptavidin peridinin chlorophyll protein (PerCP) conjugate (Becton Dickinson) for 30 min at 4° C. Stained cells were again washed twice in washing buffer and once in 0.02% sodium azide (Sigma) in PBS, by centrifugation at 300×g for 5 min at 4° C. Finally, the cells were fixed in 200 ul of 1% (v/v) formaldehyde (Polysciences, Warrington, PA) in PBS. Analysis was performed using four color flow cytometry (FACS Calibur, Becton Dickinson) as described previously. Methods of cytometer set up and data acquisition have also been described previously. List mode multiparameter data files (each file with forward scatter, side scatter, and 4 fluorescent parameter) were analyzed using the Cellquest program (Becton Dickinson). Analysis of activated populations was performed with the light scatter gate set on the T cell blast population. Negative control reagents were used to verify the staining specificity of experimental antibodies.

[0309] Miniosmotic Pumps

[0310] Six American Dutch belted rabbits in groups of 3 were implanted with subcutaneous miniosmotic pumps on the left flanks, containing 500 ug of SPE I or 200 ug of TSST-1. Lethality of the toxins was assessed over a period of 15 days.

[0311] Results

[0312] SPE I was evaluated for ability to induce rabbit splenocyte proliferation in a four day assay, as measured by incorporation of 3H thymidine into DNA (FIG. 14). SPE I was comparably mitogenic as the control SPE toxins also included in the figure. The complete fall-off of mitogenic activity for SPE I was between 10⁻⁶ and 10⁻⁷ ug/well, similar to that observed for other toxins.

[0313] SPE I significantly stimulated human T cells bearing TCR Vβs 6.7, 9, and 21.3 (FIG. 15) compared to cells stimulated with anti-CD3 antibodies, consistent with SPE I being a superantigen. Some T cell populations, for example T cells with TCR Vβ 14 or 17 were significantly reduced compared to cells stimulated with anti-CD3 antibodies.

[0314] The majority of pyrogenic toxin superantigens are lethal when administered to rabbits at a toxin concentration between 200 and 500 ug in subcutaneously implanted miniosmotic pumps. SPE I did not exhibit this property at the 500 ug dose (3/3 survived). In contrast 200 ug of TSST-1 was completely lethal (3/3 succumbed).

[0315] Discussion

[0316] Pyrogenic toxin superantigens are defined by their abilities to induce T lymphocyte proliferation nonspecifically but dependent on the composition of the variable part of the beta chain of the T cell receptor (6). Thus for example, TSST-1 will stimulate proliferation of any human T cell bearing TCR Vβ2, without regard for the antigenic specificity of the responding T cells. This high level of stimulation leads to massive release of cytokines from both T cells and macrophages. Of particular importance is the release of tumor necrosis factors α and β that cause the hypotension and shock associated with TSS.

[0317] The data show that SPE I stimulates T cells as a superantigen. Thus, SPE I causes human peripheral blood mononuclear cells to proliferate that contain TCR Vβ6.7. 9, and 21.3. This elevation of these selected T cell populations, with the concurrent relative reduction of non-stimulated T cells, is the hallmark signal of SPE I and is referred to as Vβ skewing.

[0318] In addition, many pyrogenic toxin superantigens are lethal when administered to rabbits in subcutaneously implanted miniosmotic pumps, as a model for TSS (8). These pumps are designed to release a constant amount of toxin over a period of 7 days. The experiments continue for 15 days, however, since rabbits may succumb to the administered toxin for up to that period of time. SPE I was not lethal in this model of TSS. Although many pyrogenic toxin superantigens are lethal in this assay, there are notable exceptions. For example, the newly identified staphylococcal enterotoxins L and Q are not lethal in this model, yet these two toxins share all other activities expected of the family (including superantigenicity). For these latter toxins, it has been suggested that they either are not stable in the miniosmotic pumps for the entire 7 day toxin release period or precipitate in the pumps. Accordingly, SPE I shares defining superantigenic property of pyrogenic toxin superantigens.

[0319] Although illustrated and described above with reference to specific embodiments, the invention is nevertheless not intended to be limited to the details shown. Rather, various modifications may be made in the details within the scope and range of equivalents of the claims and without departing from the spirit of the invention.

### Bibliography

[0320] 1. 1997. Case definitions for Infectious Conditions Under Public Health Surveillance. CDC.

[0321] 2. Alm, R. A., L. S. Ling, D. T. Moir, B. L. King, E. D. Brown, P. C. Doig, D. R. Smith, B. Noonan, B. C. Guild, B. L. deJonge, G. Carmel, P. J. Tummino, A. Caruso, M. Uria-Nickelsen, D. M. Mills, C. Ives, R. Gibson, D. Merberg, S. D. Mills, Q. Jiang, D. E. Taylor, G. F. Vovis, and T. J. Trust. 1999. Genomic-sequence comparison of two unrelated isolates of the human gastric pathogen Helicobacter pylori [published erratum appears in Nature 1999 February 25;397(6721):719]. Nature. 397:176-80.

[0322] 3. Altschul, S. F., T. L. Madden, A. A. Schaffer, J. Zhang, Z. Zhang, W. Miller, and D. J. Lipman. 1997. Gapped BLAST and PSI-BLAST: a new generation of protein database search programs. Nucleic Acids Res. 25:3389-402.

[0323] 4. Anderson, T. F. 1951. Techniques for the preservation of three-dimensional structure in preparing specimens for the electron microscope. Trans NY Acad Sci. 13:130-134.

[0324] 5. Benson, G. 1999. Tandem repeats finder: a program to analyze DNA sequences. Nucleic Acids Res. 27:573-80.

[0325] 6. Chen, C. C., and P. P. Cleary. 1989. Cloning and expression of the streptococcal C5a peptidase gene in Escherichia coli: linkage to the type 12 M protein gene. Infect. Immun. 57:1740-1745.

[0326] 7. Chmouryguina, I., A. Suvorov, P. Ferrieri, and P. P. Cleary. 1996. Conservation of the C5a peptidase genes in group A and B streptococci. Infect. Immun. 64:2387-2390.

[0327] 8. Cockerill, F. R., 3rd, R. L. Thompson, J. M. Musser, P. M. Schlievert, J. Talbot, K. E. Holley, W. S. Harmsen, D. M. Ilstrup, P. C. Kohner, M. H. Kim, B. Frankfort, J. M. Manahan, J. M. Steckelberg, F. Roberson, and W. R. Wilson. 1998. Molecular, serological, and clinical features of 16 consecutive cases of invasive streptococcal disease. Southeastern Minnesota Streptococcal Working Group. Clin Infect Dis. 26:1448-58.

[0328] 9. Courtney, H. S., Y. Li, J. B. Dale, and D. L. Hasty. 1994. Cloning, sequencing, and expression of a fibronectin/fibrinogen-binding protein from group A streptococci. Infect Immun. 62:3937-46.

[0329] 10. Cserzo, M., E. Wallin, L Simon, G. von Heijne, and A. Elofsson. 1997. Prediction of transmembrane alpha-helices in prokaryotic membrane proteins: the dense alignment surface method. Protein Engineering. 10:673-6.

[0330] 11. Cunningham, M. W., and A. Quinn. 1997. Immunological crossreactivity between the class I epitope of streptococcal M protein and myosin. Adv Exp Med Biol. 418:887-92.

[0331] 12. Dale, J. B., R. W. Baird, H. S. Courtney, D. L. Hasty, and M. S. Bronze. 1994. Passive protection of mice against group A streptococcal pharyngeal infection by lipoteichoic acid. J Infect Dis. 169:319-23.

[0332] 13. Dale, J. B., M. Simmons, E. C. Chiang, and E. Y. Chiang. 1996. Recombinant, octavalent group A streptococcal M protein vaccine. Vaccine. 14:944-8.

[0333] 14. Dale, J. B., R. G. Washburn, M. B. Marques, and M. R. Wessels. 1996. Hyaluronate capsule and surface M protein in resistance to opsonization of group A streptococci. Infect Immun. 64:1495-501.

[0334] 15. Eddy, S. R. 1996. Hidden Markov models. Cur Opin Struct Bio. 6:361-5.

[0335] 16. Ellen, R. P., and R. J. Gibbons. 1972. M protein-associated adherence of Streptococcus pyogenes to epithelial surfaces: prerequisite for virulence. Infect Immun. 5:826-830.

[0336] 17. Eng, J. K., A. L. McCormack, and J. R. Yates, 3rd. 1994. An approach to correlate tandem mass-spectral data of peptides with amino-acid-sequences in a protein database. Am Soc Mass Spectrometry. 5:976-89.

[0337] 18. Fischetti, V. A., V. Pancholi, and O. Schneewind. 1990. Conservation of a hexapeptide sequence in the anchor region of surface proteins from gram-positive cocci. Mol Microbiol. 4:1603-5.

[0338] 19. Fogg, G. C., and M. G. Caparon. 1997. Constitutive expression of fibronectin binding in Streptococcus pyogenes as a result of anaerobic activation of rofA. J Bacteriol. 179:6172-80.

[0339] 20. Foster, T. J., and M. Hook. 1998. Surface protein adhesins of Staphylococcus aureus. Trends Microbiol. 6:484-8.

[0340] 21. Fraser, C. M., S. Casjens, W. M. Huang, G. G. Sutton, R. Clayton, R. Lathigra, O. White, K. A. Ketchum, R. Dodson, E. K. Hickey, M. Gwinn, B. Dougherty, J. F. Tomb, R. D. Fleischmann, D. Richardson, J. Peterson, A. R. Kerlavage, J. Quackenbush, S. Salzberg, M. Hanson, R. van Vugt, N. Palmer, M. D. Adams, J. Gocayne, J. C. Venter, and et al. 1997. Genomic sequence of a Lyme disease spirochaete, Borrelia burgdorferi [see comments]. Nature. 390:580-6.

[0341] 22. Hacker, J., G. Blum-Oehler, L Muhldorfer, and H. Tschape. 1997. Pathogenicity islands of virulent bacteria: structure, function and impact on microbial evolution. Mol Microbiol. 23:1089-97.

[0342] 23. Hanski, E., and M. Caparon. 1992. Protein F, a fibronectin-binding protein, is an adhesion of the group A streptococcus Streptococcus pyogenes. Proc Natl Acad Sci., USA. 89:6172-76.

[0343] 24. Hanski, E., P. A. Horwitz, and M. G. Caparon. 1992. Expression of protein F, the fibronectin-binding protein of Streptococcus pyogenes JRS4, in heterologous streptococcal and enterococcal strains promotes their adherence to respiratory epithelial cells. Infect Immun. 60:5119-5125.

[0344] 25. Hernandez-Sanchez, J., J. G. Valadez, J. V. Herrera, C. Ontiveros, and G. Guarneros. 1998. lambda bar minigene-mediated inhibition of protein synthesis involves accumulation of peptidyl-tRNA and starvation for tRNA. EMBO Journal. 17:3758-65.

[0345] 26. Huang, T. T., H. Malke, and J. J. Ferretti. 1989. The streptokinase gene of group A streptococci: cloning, expression in Escherichia coli, and sequence analysis. Mol Microbiol. 3:197-205.

[0346] 27. Hynes, W. L., A. R. Dixon, S. L. Walton, and L. J. Aridgides. 2000. The extracellular hyaluronidase gene (hylA) of Streptococcus pyogenes. FEMS Microbiol Lett. 184:109-12.

[0347] 28. Hynes, W. L., L. Hancock, and J. J. Ferretti. 1995. Analysis of a second bacteriophage hyaluronidase gene from Streptococcus pyogenes: evidence for a third hyaluronidase involved in extracellular enzymatic activity. Infect Immun. 63:3015-20.

[0348] 29. Isberg, R. R., and G. Tran Van Nhieu. 1994. Binding and internalization of microorganisms by integrin receptors. Trends Microbio. 2: 104.

[0349] 30. Jones, K. F., and V. A. Fischetti. 1988. The importance of the location of antibody binding on the M6 protein for opsonization and phagocytosis of group A M6 streptococci. J Exp Med. 167:1114-23.

[0350] 31. Kihlberg, B. M., M. Collin, A. Olsen, and L. Bjorck. 1999. Protein H, an antiphagocytic surface protein in Streptococcus pyogenes. Infect Immun. 67:1708-14.

[0351] 32. Koebnik, R. 1995. Proposal for a peptidoglycan-associating alpha-helical motif in the C-terminal regions of some bacterial cell-surface proteins [letter; comment]. Molecular Microbiology. 16:1269-70.

[0352] 33. Loessner, M. J., S. Gaeng, and S. Scherer. 1999. Evidence for a holin-like protein gene fully embedded out of frame in the endolysin gene of Staphylococcus aureus bacteriophage 187. J Bacteriol. 181:4452-60.

[0353] 34. Lukashin, A. V., and M. Borodovsky. 1998. GeneMark.hmm: new solutions for gene finding. Nucleic Acids Res. 26:1107-15.

[0354] 35. Lukomski, S., C. A. Montgomery, J. Rurangirwa, R. S. Geske, J. P. Barrish, G. J. Adams, and J. M. Musser. 1999. Extracellular cysteine protease produced by Streptococcus pyogenes participates in the pathogenesis of invasive skin infection and dissemination in mice. Infect Immun. 67:1779-88.

[0355] 36. Madore, D. V. 1998. Characterization of immune response as an indicator of Haemophilus influenzae type b vaccine efficacy. Pediatr Infect Dis J. 17:S207-10.

[0356] 37. Matsuka, Y. V., S. Pillai, S. Gubba, J. M. Musser, and S. B. Olmsted. 1999. Fibrinogen cleavage by the Streptococcus pyogenes extracellular cysteine protease and generation of antibodies that inhibit enzyme proteolytic activity. Infect Immun. 67:4326-33.

[0357] 38. Mazmanian, S. K, G. Liu, H. Ton-That, and O. Schneewind. 1999. Staphylococcus aureus sortase, an enzyme that anchors surface proteins to the cell wall. Science. 285:760-3.

[0358] 39. McAtee, C. P., K. E. Fry, and D. E. Berg. 1998. Identification of potential diagnostic and vaccine candidates of Helicobacter pylori by “proteome” technologies. Helicobacter. 3:163-9.

[0359] 40. McAtee, C. P., M. Y. Lim, K. Fung, M. Velligan, K. Fry, T. Chow, and D. E. Berg. 1998. Identification of potential diagnostic and vaccine candidates of Helicobacter pylori by two-dimensional gel electrophoresis, sequence analysis, and serum profiling. Clin Diagn Lab Immunol. 5:537-42.

[0360] 41. McAtee, C. P., M. Y. Lim, K. Fung, M. Velligan, K. Fry, T. P. Chow, and D. E. Berg. 1998. Characterization of a Helicobacter pylori vaccine candidate by proteome techniques. J Chromatogr B Biomed Sci Appl. 714:325-33.

[0361] 42. Mejlhede, N., J. F. Atkins, and J. Neuhard. 1999. Ribosomal -1 frameshifting during decoding of Bacillus subtilis cdd occurs at the sequence CGA AAG. J. Bacteriol. 181:2930-7.

[0362] 43. Molinari, G., S. R. Talay, P. Valentin-Weigand, M. Rohde, and G. S. Chhatwal. 1997. The fibronectin-binding protein of Streptococcus pyogenes, SfbI, is involved in the internalization of group A streptococci by epithelial cells. Infect Immun. 65:1357-63.

[0363] 44. Nakai, K., and M. Kanehisa. 1991. Expert system for predicting protein localization sites in gram-negative bacteria. Proteins. 11:95-110.

[0364] 45. Navarre, W. W., and O. Schneewind. 1999. Surface proteins of gram-positive bacteria and mechanisms of their targeting to the cell wall envelope. Microbiol Mol Biol Rev. 63:174-229.

[0365] 46. Nielsen, H., J. Engelbrecht, S. Brunak, and G. von Heijne. 1997. Identification of prokaryotic and eukaryotic signal peptides and prediction of their cleavage sites. Protein Engineering. 10:1-6.

[0366] 47. Nizet, V., B. Beall, D. J. Bast, V. Datta, L. Kilburn, D. E. Low, and J. C. De Azavedo. 2000. Genetic locus for streptolysin S production by group A streptococcus. Infect Immun. 68:4245-54.

[0367] 48. Nordstrand, A., W. M. McShan, J. J. Ferretti, S. E. Holm, and M. Norgren. 2000. Allele substitution of the streptokinase gene reduces the nephritogenic capacity of group A streptococcal strain NZ131. Infect Immun. 68:1019-25.

[0368] 49. Olmsted, S. B., S. L. Erlandsen, G. M. Dunny, and C. L. Wells. 1993. High-resolution visualization by field emission scanning electron microscopy of Enterococcus faecalis surface proteins encoded by the pheromone-inducible conjugative plasmid pCF10. J Bacteriol. 175:6229-37.

[0369] 50. Park, J., and S. A. Teichmann. 1998. DIVCLUS: an automatic method in the GEANFAMMER package that finds homologous domains in single- and multi-domain proteins. Bioinformatics. 14:144-50.

[0370] 51. Parkhill, J., M. Achtman, K. D. James, S. D. Bentley, C. Churcher, S. R. Klee, G. Morelli, D. Basham, D. Brown, T. Chillingworth, R. M. Davies, P. Davis, K. Devlin, T. Feltwell, N. Hamlin, S. Holroyd, K. Jagels, S. Leather, S. Moule, K. Mungall, M. A. Quail, M. A. Rajandream, K M. Rutherford, M. Simmonds, J. Skelton, S. Whitehead, B. G. Spratt, and B. G. Barrell. 2000. Complete DNA sequence of a serogroup A strain of Neisseria meningitidis Z2491 [see comments]. Nature. 404:502-6.

[0371] 52. Pierschbacher, M. D., and E. Ruoslahti. 1987. Influence of stereochemistry of the sequence Arg-Gly-Asp-Xaa on binding specificity in cell adhesion. J Biol Chem. 262:17294-8.

[0372] 53. Pizza, M., V. Scarlato, V. Masignani, M. M. Giuliani, B. Arico, M. Comanducci, G. T. Jennings, L. Baldi, E. Bartolini, B. Capecchi, C. L. Galeotti, E. Luzzi, R. Manetti, E. Marchetti, M. Mora, S. Nuti, G. Ratti, L. Santini, S. Savino, M. Scarselli, E. Storni, P. Zuo, M. Broeker, E. Hundt, B. Knapp, E. Blair, T. Mason, H. Tettelin, D. W. Hood, A. C. Jeffries, N. J. Saunders, D. M. Granoff, J. C. Venter, E. R. Moxon, G. Grandi, and R. Rappuoli. 2000. Identification of vaccine candidates against serogroup B meningococcus by whole-genome sequencing [see comments]. Science. 287:1816-20.

[0373] 54. Podbielski, A., A. Flosdorff, and J. Weber-Heynemann. 1995. The group A streptococcal virR49 gene controls expression of four structural vir regulon genes. Infect Immun. 63:9-20.

[0374] 55. Proft, T., S. Louise Moffatt, C. J. Berkahn, and J. D. Fraser. 1999. Identification and Characterization of Novel Superantigens from Streptococcus pyogenes. J Exp Med. 189:89-102.

[0375] 56. Pugsley, A. P. 1993. The complete general secretory pathway in gram-negative bacteria. Microbiol Rev. 57:50-108.

[0376] 57. Quinn, A., K. Ward, V. A. Fischetti, M. Hemric, and M. W. Cunningham. 1998. Immunological relationship between the class I epitope of streptococcal M protein and myosin. Infect Immun. 66:4418-24.

[0377] 58. Reda, K B., V. Kapur, D. Goela, J. G. Lamphear, J. M. Musser, and R. R. Rich. 1996. Phylogenetic distribution of streptococcal superantigen SSA allelic variants provides evidence for horizontal transfer of ssa within Streptococcus pyogenes. Infect Immun. 64:1161-5.

[0378] 59. Salzberg, S. L., A. L. Delcher, S. Kasif, and O. White. 1998. Microbial gene identification using interpolated Markov models. Nucleic Acids Res. 26:544-8.

[0379] 60. Sonnenberg, M. G., and J. T. Belisle. 1997. Definition of Mycobacterium tuberculosis culture filtrate proteins by two-dimensional polyacrylamide gel electrophoresis, N-terminal amino acid sequencing, and electrospray mass spectrometry. Infect Immun. 65:4515-24.

[0380] 61. Bateman, A. T., R. Birney, S. P. Durbin, K. L. Howe and E. L. L. Sonnhammer. 2000. The Pfam protein families database. Nuc. Acids. Res. 28:263-6.

[0381] 62. Stevens, D. L. 1995. Streptococcal toxic-shock syndrome: spectrum of disease, pathogenesis, and new concepts in treatment. Emerg Infect Dis. 1:69-78.

[0382] 63. Stockbauer, K. E., L. Magoun, M. Liu, E. H. Burns, Jr., S. Gubba, S. Renish, X. Pan, S. C. Bodary, E. Baker, J. Coburn, J. M. Leong, and J. M. Musser. 1999. A natural variant of the cysteine protease virulence factor of group A streptococcus with an arginine-glycine-aspartic acid (RGD) motif preferentially binds human integrins alphavbeta3 and alphaIIbbeta3 [In Process Citation]. Proc Natl Acad Sci., USA. 96:242-7.

[0383] 64. Ton-That, H., G. Liu, S. K. Mazmanian, K. F. Faull, and O. Schneewind. 1999. Purification and characterization of sortase, the transpeptidase that cleaves surface proteins of Staphylococcus aureus at the LPXTG motif. Proc Natl Acad Sci USA. 96:12424-12429.

[0384] 65. Weldingh, K., I. Rosenkrands, S. Jacobsen, P. B. Rasmussen, M. J. Elhay, and P. Andersen. 1998. Two-dimensional electrophoresis for analysis of Mycobacterium tuberculosis culture filtrate and purification and characterization of six novel proteins. Infect Immun. 66:3492-500.

[0385] 66. Yutsudo, T., K. Okumura, M. Iwasaki, A. Hara, S. Kamitani, W. Minamide, H. Igarashi, and Y. Hinuma. 1994. The gene encoding a new mitogenic factor in a Streptococcus pyogenes strain is distributed only in group A streptococci. Infection and Immunity. 62:4000-4004.

[0386] 67. Published International Patent Application Number WO99/27944.

[0387] 68. U.S. Pat. No. 4,666,829.

What is claimed is:

1. An isolated polypeptide comprising:
(i) an amino acid sequence that has at least 70% identity to an amino acid sequence of any of even numbered SEQ ID NOS: 2-668;
(ii) an amino acid sequence of any of even numbered SEQ ID NOS: 2-668;
(iii) an immunogenic fragment of any amino acid sequence of (i) or (ii);
(iv) at least 7 contiguous amino acid residues of any amino acid sequence of (i) or (ii); or
(v) a biological equivalent of any of (i), (ii), (iii) or (iv) that is effective for preventing or ameliorating β-hemolytic streptococcal colonization or infection in a susceptible subject.

2. The isolated polypeptide of claim 1, wherein the biological equivalent exhibits an opsonophagocytic activity of at least about 15% percent killing of bacteria as measured by decrease in colony forming units (CFU) in OPA versus a negative control.

3. The isolated polypeptide of claim 1, wherein the biological equivalent exhibits an opsonophagocytic activity of at least about 20% percent killing of bacteria as measured by decrease in colony forming units (CFU) in OPA versus a negative control.

4. The isolated polypeptide of claim 1, wherein the biological equivalent exhibits an opsonophagocytic activity of at least about 40% percent killing of bacteria as measured by decrease in colony forming units (CFU) in OPA versus a negative control.

5. The isolated polypeptide of claim 1, wherein the biological equivalent exhibits an opsonophagocytic activity of at least about 50% percent killing of bacteria as measured by decrease in colony forming units (CFU) in OPA versus a negative control.

6. The isolated polypeptide of claim 1, wherein the biological equivalent exhibits an opsonophagocytic activity of at least about 60% percent killing of bacteria as measured by decrease in colony forming units (CFU) in OPA versus a negative control.

7. The isolated polypeptide of claim 1, wherein the biological equivalent provides a desired level of protection against β-hemolytic streptococci.

8. The isolated polypeptide of claim 7, comprising any of (i) an amino acid sequence that has at least 70% identity to an amino acid sequence of any of even numbered SEQ ID NOS: 2-668, (ii) an amino acid sequence of any of even numbered SEQ ID NOS: 2-668, (iii) an immunogenic fragment of any amino acid sequence of (i) or (ii), or (iv) at least 7 contiguous amino acid residues of any amino acid sequence of (i) or (ii).

9. The isolated polypeptide of claim 1, comprising an amino acid sequence that has at least 85% identity to an amino acid sequence of any of even numbered SEQ ID NOS: 2-668.

10. The isolated polypeptide of claim 1, wherein the biological equivalent provides cross-reactivity across at least two strains of β-hemolytic streptococci.

11. The isolated polypeptide of claim 1, wherein the amino acid sequence is selected from the group consisting of SEQ ID NO: 6, SEQ ID NO: 46, SEQ ID NO: 48, SEQ ID NO: 80, SEQ ID NO: 88 and combinations thereof.

12. The isolated polypeptide of claim 1, wherein the amino acid sequence is selected from the group consisting of SEQ ID NO: 16, SEQ ID NO: 64, SEQ ID NO: 128, SEQ ID NO: 140, SEQ ID NO: 182 and combinations thereof.

13. The isolated polypeptide of claim 1, wherein the amino acid sequence is selected from the group consisting of SEQ ID NO: 32, SEQ ID NO: 58, SEQ ID NO: 60, SEQ ID NO: 104, SEQ ID NO: 138 and combinations thereof.

14. The isolated polypeptide of claim 1, wherein the amino acid sequence is selected from the group consisting of SEQ ID NO: 66, SEQ ID NO: 82, SEQ ID NO: 78, SEQ ID NO: 142, SEQ ID NO: 146, SEQ ID NO: 162, SEQ ID NO: 186, SEQ ID NO: 342 and combinations thereof.

15. The isolated polypeptide of claim 1, wherein the amino acid sequence is selected from the group consisting of SEQ ID NO: 2, SEQ ID NO: 8, SEQ ID NO: 20, SEQ ID NO: 22, SEQ ID NO: 24, SEQ ID NO: 34, SEQ ID NO: 40, SEQ ID NO: 42, SEQ ID NO: 44, SEQ ID NO: 54, SEQ ID NO: 62, SEQ ID NO: 68, SEQ ID NO: 90, SEQ ID NO: 96, SEQ ID NO: 98, SEQ ID NO: 100, SEQ ID NO: 106, SEQ ID NO: 118, SEQ ID NO: 124, SEQ ID NO: 130, SEQ ID NO: 148, SEQ ID NO: 158, SEQ ID NO: 376 and combinations thereof.

16. The isolated polypeptide of claim 2, wherein the amino acid sequence is SEQ ID NO: 6.

17. The isolated polypeptide of claim 2, wherein the amino acid sequence is SEQ ID NO: 46.

18. The isolated polypeptide of claim 2, wherein the amino acid sequence is SEQ ID NO: 48.

19. The isolated polypeptide of claim 2, wherein the amino acid sequence is SEQ ID NO: 80.

20. The isolated polypeptide of claim 2, wherein the amino acid sequence is SEQ ID NO: 88.

21. The isolated polypeptide of claim 1, where said isolated polypeptide is a mature polypeptide of an amino acid sequence of any of even numbered SEQ ID NOS: 2-668.

22. An isolated polynucleotide comprising:
(i) a nucleotide sequence that encodes the isolated polypeptide of claim 1;
(ii) a nucleotide sequence that encodes the isolated polypeptide of claim 1, where said isolated polypeptide is a mature polypeptide;
(iii) a nucleotide sequence of any of odd numbered SEQ ID NOS: 1-147;
(iv) a nucleotide sequence of any of odd numbered SEQ ID NOS: 149-181;
(v) a nucleotide sequence of any of odd numbered SEQ ID NOS: 183-187;
(vi) a nucleotide sequence of any of odd numbered SEQ ID NOS: 189- 667;
(vii) a nucleotide sequence that has at least 70% identity to a nucleotide sequence that encodes the polypeptide of claim 1;
(viii) a nucleotide sequence that has at least 70% identity to a nucleotide sequence of any of odd numbered SEQ ID NOS: 1-667;
(ix) a nucleotide sequence that hybridizes under stringent hybridization conditions to a nucleotide sequence that encodes the polypeptide of claim 1;
(x) a nucleotide sequence that hybridizes under stringent hybridization conditions to a nucleotide sequence of any of odd numbered SEQ ID NOS: 1-667; or (xi) a nucleotide sequence that is fully complementary to a nucleotide sequence of any of (i)-(x).

23. The isolated polynucleotide of claim 22, wherein the nucleotide sequence is selected from the group consisting of SEQ ID NO: 5, SEQ ID NO: 45, SEQ ID NO: 47, SEQ ID NO: 79, SEQ ID NO: 87 and combinations thereof.

24. The isolated polynucleotide of claim 22, wherein the nucleotide sequence is selected from the group consisting of SEQ ID NO: 15, SEQ ID NO: 63, SEQ ID NO: 127, SEQ ID NO: 139, SEQ ID NO: 181 and combinations thereof.

25. The isolated polynucleotide of claim 22, wherein the nucleotide sequence is selected from the group consisting of SEQ ID NO: 31, SEQ ID NO: 57, SEQ ID NO: 59, SEQ ID NO: 103, SEQ ID NO: 137 and combinations thereof.

26. The isolated polynucleotide of claim 22, wherein the nucleotide sequence is selected from the group consisting of SEQ ID NO: 65, SEQ ID NO: 81, SEQ ID NO: 77, SEQ ID NO: 141, SEQ ID NO: 145, SEQ ID NO: 161, SEQ ID NO: 185, SEQ ID NO: 341 and combinations thereof.

27. The isolated polynucleotide of claim 22, wherein the nucleotide sequence is selected from the group consisting of SEQ ID NO: 1, SEQ ID NO: 7, SEQ ID NO: 19, SEQ ID NO: 21, SEQ ID NO: 23, SEQ ID NO: 33, SEQ ID NO: 39, SEQ ID NO: 41, SEQ ID NO: 43, SEQ ID NO: 53, SEQ ID NO: 61, SEQ ID NO: 67, SEQ ID NO: 89, SEQ ID NO: 95, SEQ ID NO: 97, SEQ ID NO: 99, SEQ ID NO: 105, SEQ ID NO: 117, SEQ ID NO: 123, SEQ ID NO: 129, SEQ ID NO:147, SEQ ID NO: 157, SEQ ID NO: 375 and combinations thereof.

28. The isolated polynucleotide of claim 22, wherein the nucleotide sequence is selected from the group consisting of 25, 131, 147, 149, 151, 153, 155, 159, 163, 165, 169, 171, 173, 175, 177, 179, 183, 187, 215, 243, 301, 327, 331, 463, 541, 579, 617, 619, 665, 669 and combinations thereof.

29. A recombinant host cell comprising a polynucleotide of claim 22.

30. A recombinant expression vector comprising a polynucleotide of claim 22.

31. A recombinant host cell comprising a vector of claim 22.

32. A method for producing a polypeptide comprising:
(a) culturing a recombinant host cell comprising (i) a polynucleotide of claim 22 or (ii) a recombinant expression vector comprising a polynucleotide of claim 22, under conditions suitable to produce the polypeptide encoded by the polynucleotide; and
(b) recovering the polypeptide from the culture.

33. An antibody that binds immunospecifically to a polypeptide of claim 1.

34. The antibody of claim 33, wherein the antibody binds immunospecifically to a polypeptide having an amino acid sequence which is selected from the group consisting of SEQ ID NO: 6, SEQ ID NO: 46, SEQ ID NO: 48, SEQ D) NO: 80, SEQ ID NO: 88 and combinations thereof.

35. The antibody of claim 33, wherein the antibody binds immunospecifically to a polypeptide having an amino acid sequence which is selected from the group consisting of SEQ ID NO: 16, SEQ ID NO: 64, SEQ ID NO: 128, SEQ ID NO: 140, SEQ ID NO: 182 and combinations thereof.

36. The antibody of claim 33, wherein the antibody binds immunospecifically to a polypeptide having an amino acid sequence which is selected from the group consisting of SEQ ID NO: 32, SEQ ID NO: 58, SEQ ID NO: 60, SEQ ID NO: 104, SEQ ID NO: 138 and combinations thereof.

37. The antibody of claim 33, wherein the antibody binds immunospecifically to a polypeptide having an amino acid sequence which is selected from the group consisting of SEQ ID NO: 66, SEQ ID NO: 82, SEQ ID NO: 78, SEQ ID NO: 142, SEQ ID NO: 146, SEQ ID NO: 162, SEQ ID NO: 186, SEQ ID NO: 342 and combinations thereof.

38. The antibody of claim 33, wherein the antibody binds immunospecifically to a polypeptide having an amino acid sequence which is selected from the group consisting of SEQ ID NO: 2, SEQ ID NO: 8, SEQ ID NO: 20, SEQ ID NO: 22, SEQ ID NO: 24, SEQ ID NO: 34, SEQ ID NO: 40, SEQ ID NO: 42, SEQ ID NO: 44, SEQ ID NO: 54, SEQ ID NO: 62, SEQ ID NO: 68, SEQ ID NO: 90, SEQ ID NO: 96, SEQ ID NO: 98, SEQ ID NO: 100, SEQ ID NO: 106, SEQ ID NO: 118, SEQ ID NO: 124, SEQ ID NO: 130, SEQ ID NO: 148, SEQ ID NO: 158, SEQ ID NO: 376 and combinations thereof.

39. The antibody of claim 33, wherein the antibody binds immunospecifically to a polypeptide having an amino acid sequence which is selected from the group consisting of 26, 132, 148, 150, 152, 154, 156, 160, 164, 166, 170, 172, 174, 176, 178, 180, 184, 188, 216, 244, 302, 328, 332, 464, 542, 580, 618, 620, 666, 670 and combinations thereof.

40. The antibody of claim 34, wherein the antibody binds immunospecifically to a polypeptide having an amino acid sequence which is SEQ ID NO: 6.

41. The antibody of claim 34, wherein the antibody binds immunospecifically to a polypeptide having an amino acid sequence which is SEQ ID NO: 46.

42. The antibody of claim 34, wherein the antibody binds immunospecifically to a polypeptide having an amino acid sequence which is SEQ ID NO: 48.

43. The antibody of claim 34, wherein the antibody binds immunospecifically to a polypeptide having an amino acid sequence which is SEQ ID NO: 80.

44. The antibody of claim 34, wherein the antibody binds immunospecifically to a polypeptide having an amino acid sequence which is SEQ ID NO: 88.

45. An immunogenic composition comprising an immunogenic amount of a component that comprises a polypeptide of claim 1, wherein said component is in an amount effective to prevent or ameliorate a β-hemolytic streptococcal colonization or infection in a susceptible mammal.

46. The immunogenic composition of claim 45, which comprises at least a portion of said polypeptide conjugated or linked to a peptide, polypeptide, or protein.

47. The immunogenic composition of claim 45, which comprises at least a portion of said polypeptide conjugated or linked to a polysaccharide.

48. The immunogenic composition of claim 45, which further comprises a physiologically-acceptable vehicle.

49. The immunogenic composition of claim 45, which further comprises an effective amount of an adjuvant.

50. The immunogenic composition of claim 45, wherein the mammal is a human, dog, bovine, porcine, or horse.

51. The immunogenic composition of claim 50, wherein the mammal is human.

52. An immunogenic composition comprising an immunogenic amount of a component that comprises a polypeptide of claim 1, wherein the polypeptide is capable of generating antibody that specifically recognizes said polypeptide, and wherein the amount of said component is effective to prevent or ameliorate β-hemolytic streptococcal colonization or infection in a susceptible mammal.

53. An immunogenic composition comprising an immunogenic amount of a component that comprises a polynucleotide of claim 22, wherein said component is in an amount effective to prevent or ameliorate a β-hemolytic streptococcal colonization or infection in a susceptible mammal.

54. The immunogenic composition of claim 53, comprising a recombinant expression vector comprising a polynucleotide of claim 22.

55. The immunogenic composition of claim 53, which further comprises a physiologically-acceptable vehicle.

56. The immunogenic composition of claim 53, which further comprises an effective amount of an adjuvant.

57. The immunogenic composition of claim 53, wherein the mammal is a human, dog, bovine, porcine, or horse.

58. The immunogenic composition of claim 57, wherein the mammal is human.

59. The immunogenic composition of claim 53, wherein the β-hemolytic streptococci is group A streptococci, group B streptococci, group C streptococci, or group G streptococci.

60. The immunogenic composition of claim 59, wherein the β-hemolytic streptococci is Streptococcus pyogenes.

61. An immunogenic composition comprising:
(i) an isolated polypeptide that is substantially conserved across strains of β-hemolytic streptococci and that is effective in preventing or ameliorating a β-hemolytic streptococcal colonization or infection in a susceptible subject, said isolated polypeptide having at least 70% identity to an amino acid sequence of any of even numbered SEQ ID NOS: 2-668.
(ii) an immunogenic fragment of (i); or
(iii) an antibody that immunospecifically binds to (i) or (ii).

62. The immunogenic composition of claim 61, wherein the isolated polypeptide tests positive for reactivity when tested against human serum.

63. The immunogenic composition of claim 61, wherein the β-hemolytic streptococci is group A streptococci, group B streptococci, group C streptococci, or group G streptococci.

64. The immunogenic composition of claim 61, wherein the β-hemolytic streptococci is Streptococcus pyogenes.

65. The immunogenic composition of claim 61, wherein the isolated polypeptide is at least about 80% conserved across the strains.

66. The immunogenic composition of claim 61, wherein the isolated polypeptide is at least about 85% conserved across the strains.

67. The immunogenic composition of claim 61, wherein the isolated polypeptide is at least about 90% conserved across the strains.

68. The immunogenic composition of claim 61, wherein the isolated polypeptide is at least about 95% conserved across the strains.

69. A method of protecting a susceptible mammal against β-hemolytic streptococcal colonization or infection comprising administering to the mammal an immunogenic composition that comprises an immunogenic amount of a component that comprises a polypeptide of claim 1, which amount is effective to prevent or ameliorate β-hemolytic streptococcal colonization or infection in the susceptible mammal.

70. The method of claim 69, wherein the immunogenic composition comprises at least a portion of said polypeptide, optionally conjugated or linked to a peptide, polypeptide, or protein.

71. The method of claim 69, wherein the immunogenic composition comprises at least a portion of said polypeptide, optionally conjugated or linked to a polysaccharide.

72. A method of protecting a susceptible mammal against β-hemolytic streptococcal colonization or infection comprising administering to the mammal an effective amount of an immunogenic composition comprising a polypeptide of claim 1, wherein the polypeptide is capable of generating antibody specific to said polypeptide, and wherein the amount is effective to prevent or ameliorate β-hemolytic streptococcal colonization or infection in the susceptible mammal.

73. The method of claim 72, wherein the polypeptide comprises the mature polypeptide of an amino acid sequence of any of SEQ ID NOS: 2-670.

74. The method of claim 72, wherein the immunogenic composition further comprises a physiologically-acceptable vehicle.

75. The method of claim 72, wherein the immunogenic composition is administered by subcutaneous or intramuscular injection.

76. The method of claim 72, wherein the immunogenic composition is administered by oral ingestion.

77. The method of claim 72, wherein the immunogenic composition is administered intranasally.

78. The method of claim 72, wherein the β-hemolytic streptococci is group A streptococci, group B streptococci, group C streptococci, or group G streptococci.

79. The method of claim 72, wherein the β-hemolytic streptococci is Streptococcus pyogenes.

80. The method of claim 72, wherein the mammal is a human, dog, bovine, porcine, or horse.

81. The method of claim 80, wherein the mammal is human.

82. A method of protecting a susceptible mammal against β-hemolytic streptococcal colonization or infection comprising administering to the mammal an effective amount of an immunogenic composition comprising a polynucleotide of claim 22, which amount is effective to prevent or ameliorate β-hemolytic streptococcal colonization or infection in the susceptible mammal.

83. The method of claim 82, wherein said immunogenic composition comprises a recombinant expression vector comprising the polynucleotide of claim 22.

84. The method of claim 82, wherein the immunogenic composition further comprises a physiologically-acceptable vehicle.

85. The method of claim 82, wherein the immunogenic composition is administered by subcutaneous or intramuscular injection.

86. The method of claim 82, wherein the immunogenic composition is administered by oral ingestion.

87. The method of claim 82, wherein the immunogenic composition is administered intranasally.

88. The method of claim 82, wherein the β-hemolytic streptococci is group A streptococci, group B streptococci, group C streptococci, or group G streptococci.

89. The method of claim 82, wherein the β-hemolytic streptococci is Streptococcus pyogenes.

90. The method of claim 82, wherein the mammal is a human, dog, bovine, porcine, or horse.

91. The method of claim 90, wherein the mammal is human.

92. A composition for reducing at least one of the number and the growth of β-hemolytic streptococci in a mammal having a β-hemolytic streptococcal colonization or infection, comprising an antibody that immunospecifically binds with the polypeptide of claim 1.

93. A composition for reducing at least one of the number and the growth of β-hemolytic streptococci in a mammal having a β-hemolytic streptococcal colonization or infection, comprising an antisense oligonucleotide capable of blocking expression of a nucleotide sequence encoding a polypeptide of claim 1.

94. The composition of claim 93, wherein the polypeptide comprises the mature polypeptide of an amino acid sequence of any of SEQ ID NOS: 2-668.

95. A composition for reducing at least one of the number and the growth of β-hemolytic streptococci, comprising an antisense oligonucleotide capable of blocking expression of a nucleotide sequence encoding a polypeptide of claim 1.

96. The composition of claim 95, wherein the polypeptide comprises the mature polypeptide of an amino acid sequence of any of SEQ D NOS: 2-668.

97. A method for reducing at least one of the number and the growth of β-hemolytic streptococci in a mammal having a β-hemolytic streptococcal colonization or infection, comprising administering to the mammal an effective amount of a composition comprising an antibody that immunospecifically bind to the polypeptide of claim 1, which amount is effective to reduce the at least one of the number and the growth of β-hemolytic streptococci in the mammal.

98. A method for reducing at least one of the number and the growth of β-hemolytic streptococci in a mammal having a β-hemolytic streptococcal colonization or infection, comprising administering to the mammal an effective amount of a composition comprising an antisense oligonucleotide capable of blocking expression of a nucleotide sequence encoding a polypeptide of claim 1.

99. A method for reducing side effects caused by β-hemolytic streptococcal infection in a mammal, comprising administering to the mammal an effective amount of a composition comprising an antibody that immunospecifically binds to the polypeptide of claim 1, which amount is effective to reduce at least one of the number of and the growth of β-hemolytic streptococci in the mammal.

100. A method for reducing side effects caused by β-hemolytic streptococcal infection in a mammal, comprising administering to the mammal an effective amount of a composition comprising an antisense oligonucleotide capable of blocking expression of a nucleotide sequence encoding a polypeptide of claim 1, which amount is effective to reduce at least one of the number of and the growth of β-hemolytic streptococci in the mammal.

101. A method for detecting and/or identifying β-hemolytic streptococci in a biological sample, comprising:
(a) contacting the biological sample with a polynucleotide of claim 22 under conditions that permit hybridization of complementary base pairs; and
(b) detecting the presence of hybridization complexes in the sample, wherein the detection of hybridization complexes indicates the presence of β-hemolytic streptococci in the biological sample.

102. The method of claim 101, wherein said β-hemolytic streptococci is Streptococcus pyogenes.

103. A method for detecting and/or identifying β-hemolytic streptococci in a biological sample, comprising:
(a) contacting the biological sample with an antibody that immunospecifically binds to the polypeptide of claim 1 under conditions suitable for the formation of immune complexes; and
(b) detecting the presence of immune complexes in the sample, wherein the detection of immune complexes indicates the presence of β-hemolytic streptococci in the biological sample.

104. The method of claim 103, wherein said β-hemolytic streptococci is Streptococcus pyogenes.

105. A method for detecting and/or identifying antibodies to β-hemolytic streptococci in a biological sample, comprising:
(a) contacting the biological sample with the polypeptide of claim 1 under conditions suitable for the formation of immune complexes; and
(b) detecting the presence of immune complexes in the sample, wherein the detection of immune complexes indicates the presence of antibodies to β-hemolytic streptococci in the biological sample.

106. The method of claim 105, wherein the polypeptide comprises a mature polypeptide of an amino acid sequence of any of even SEQ ID NOS: 2-670.

107. The method of claim 105, wherein said β-hemolytic streptococci is Streptococcus pyogenes.

108. An immunogenic composition comprising a polypeptide of claim 1.

109. The immunogenic composition of claim 108, said polypeptide being a mature polypeptide of an amino acid sequence of even numbered SEQ ID NOS: 2-668.

110. An immunogenic composition comprising a polynucleotide of claim 22.

111. The immunogenic composition of claim 110, comprising the expression vector of claim 30.

112. An immunogenic composition comprising an antibody that immunospecifically binds to the isolated polypeptide of claim 1.

113. The immunogenic composition of claim 112, wherein the isolated polypeptide comprises a mature polypeptide of an amino acid sequence of any of even numbered SEQ ID NOS: 2-668.

114. An isolated polynucleotide comprising a nucleotide sequence that has at least 70% identity to a nucleotide sequence that encodes an amino acid of SEQ ID NOS: 2-668, said polynucleotide being identified by the steps comprising:
(a) obtaining a first and second PCR primer derived from a nucleotide that encodes a mature polypeptide of SEQ ID NOS: 2-668, wherein the first and second primers are capable of initiating nucleic acid synthesis in an outward manner under PCR conditions, and wherein the first primer is capable of being extended in an antisense direction and the second primer is capable of being extended in a sense direction; and
(b) combining said first and second PCR primer with a cDNA library that contains said polynucleotide under PCR conditions suitable for synthesizing said nucleotide sequence from the first and second primers.

115. A method for extending a polynucleotide of claim 22 using polymerase chain reaction (PCR), comprising the steps of:
(a) obtaining a first and second PCR primer derived from said polynucleotide, wherein the first and second PCR primers are capable of initiating nucleic acid synthesis in an outward manner under PCR conditions, and wherein the first PCR primer is capable of being extended in an antisense direction and the second PCR primer is capable of being extended in a sense direction; and
(b) combining said first and second PCR primers with said polynucleotide contained in a cDNA library under PCR conditions suitable for synthesizing nucleotide sequences from the first and second PCR primers, thereby extending said polynucleotide.

The application's sequence listing, which the Patent Office published only in electronic form, follows.

SEQUENCE LISTING (674 sequences)

SEQ ID NO: 1 - DNA, 3834 bp, Streptococcus pyogenes
ttgaaaatgaaaaaaatcagcaaatgtgcgtttgtggcaatatctgcccttgttctcattcaggctactcaaactgtaaaatcacaagagcctttagttcagtcacaactcgtgacaacagtagctttaactcaggataatcgacttttagttgaagagataggcccttacgctagtcaatcagctggaaaagagtattataaacatattgaaaagattattgttgataatgatgtctatgaaaaaagcctggagggcgagcgaacctttgatattaactaccaagggattaagatcaatgctgaccttattaaagacggtaagcatgaattgactattgttaataaaaaagatggtgatatcctaattacctttattaaaaagggcgataaagtgacctttatttcagctcaaaaattaggaacaacagatcatcaggattcattaaaaaaagatgtgctcagtgataaaacagtgccacaaaaccaaggcacacaaaaagttgttaaatctgggaaaaatactgctaacttgtcattaataacaaaattgagtcaagaagatggtgcaattttatttccagaaattgatcgttattctgataacaaacagataaaagcattgactcagcaaatcacaaaggttacagtcaatggtacagtttataaagatcttatttcagattctgtaaaagatactaatggctgggtctcgaatatgacagggcttcatcttggaacaaaagctttcaaagatggagaaaatacaatcgtgatatcctcaaaaggatttgaagacgttactattaccgttaccaagaaagatggtcaaatccattttgtatctgccaaacaaaaacaacatgtgactgctgaagacagacaatcaacaaagttggatgtcaccactttggaaaaagctatcaaagaagcggatgcgattattgctaaagaaagcaacaaagacgcggtcaaagatctggctgagaaacttcaagtcatcaaggattcttacaaagaaatcaaagatagtaagctactcgccgatactcatcgactgttaaaagataccatcgagtcttatcaagcaggtgaggtttctattaacaatctcacagaaggaacctatacgctaaactttaaagctaataaagaaaactcagaagagtcctccatgcttcaaggtgcttttgataaaagagccaaattagtggttaaagcagatggtacaatggaaatttccatgcttaatactgctttgggacaatttttgattgacttttctattgaaagcaaagggacctacccagcagcagtgcgtaaacaagttggccaaaaagatatcaatggtagctatattcgaagcgaatttaccatgcctattgatgatttggataaattacacaaaggtgctgttttggtatcagccatgggaggtcaagaaagtgatttaaaccactatgacaaatacaccaaacttgacatgacctttagtaagaccgttaccaaaggctggagtggttatcaggtagaaactgatgataaagaaaaaggggttgggactgaacgtcttgaaaaagttttagttaaacttggcaaagatttagacggcgatggtaaattatcaaaaacggaattagaacagattcgaggcgagttgcgtctagaccattacgagttaactgatatttctttattgaaacatgctaaaaatattacagaactacatctggatggaaaccaaattacggaaattccaaaagagttatttagtcaaatgaagcaacttcgatttcttaacttaagaagtaatcatttaacttatctagacaaagatacatttaaaagcaatgctcaattaagagaactctacttatcaagtaactttattcactctcttgaaggaggactattccagtcgcttcatcacctggagcaacttgatctttccaagaatcgtattggccgactttgtgataacccatttgaaggattgtctcgtctgacttcattaggtttcgcagaaaatagtcttgaggagatacctgaaaaagcgctagagcctctaacatcacttaattttatcgacttatctcaaaataatttagcactactgccaaaaacaatagaaaaattgcgcgccttaagcactattgtggcaagtagaaatcatattactcgtattgataatatttcatttaaaaatcttcctaaattatctgtactcgatttatcaactaatgaaatttcaaatcttccaaatggtatatttaaacagaataaccaattaacaaaacttgattttttcaataacttgcttactcaggttgaagaatcagtatttccagatgttgaaacgcttaatttagatgtgaagttcaatcagataaaaagtgtgagtccaaaagtaagagctcttatcggacaacacaaactgactccacaaaaacatattgcaaaacttgaagcttccttagatggcgaaaaaataaaatatcatcaagctttcagtcttttagatttgtattattgggagcaaaaaacaaattctgccattgataaagaactagtgtctgttgaagaatatcaacaattgttacaagaaaaaggttcagatacggtttctttacttaatgatatgcaagtcgattggagtattgtgattcagttgcaaaaaaaagcttccaatggacagtatgtgacggttgacgaaaagcttctctcaaatgatccgaaagatgacttaacgggagagttttctttaaaagatccaggtacatatcggattcgcaaagctttaataacaaagaaatttgctactcaaaaagaacatatctatttgacatctaatgatatccttgtggcgaaaggaccacattcacatcagaaagatttagttgagaacggccttagagcattaaatcaaaaacaattgcgtgatggtatttactatttaaatgccagcatgttaaaaactgacttagcatctgagtccatgtcaaacaaggctattaatcatcgagtgactttggtagttaaaaaaggtgtttcctatttagaagttgagtttagaggtataaaggttggtaaaatgttaggctaccttggtgaattgagctatttcgtagatggttaccaaagagatttagctggtaaaccagttggtcgaacaaaaaaggcagaggttgtgtcttatttcacggatgtaactggcctaccattggcagatcgttatggaaaaaactatccaaaagtgctgcgtatgaaattgattgaacaagcgaagaaagacggacttgtgccattacaggtctttgtgcctatcatggatgccatttcaaaagggtctggccttcaaaccgtttttatgcgtttagactgggcaagccttacaacagagaaggcaaaggttgtcaaagaaactaataatccacaagaaaatagccatctaacttcaacagatcagttgaaaggacctcaaaatcgtcaacaagaaaaaacacctacaagtcctccttcagcagctactggtattgctaacttaactgatctcctggctaaaaaagcaaccggccaatcaactcaagaaacttctaagacagatgatactgataaggcagagaaattgaagcagttagtgcgtgaccatcaaacatcaattgaaggtaaaacagcaaaagatactaagactaaaaaatctgataagaaacatcgttccaatcaacaatcaaatggtgaagaaagtagctctcgttatcacttaattgcaggtctatctagctttatgatcgtagctctgggattcattattggtcgaaagacattatttaaataa

SEQ ID NO: 2 - protein, 1277 aa, Streptococcus pyogenes
MKMKKISKCAFVAISALVLIQATQTVKSQEPLVQSQLVTTVALTQDNRLLVEEIGPYASQSAGKEYYKHIEKIIVDNDVYEKSLEGERTFDINYQGIKINADLIKDGKHELTIVNKKDGDILITFIKKGDKVTFISAQKLGTTDHQDSLKKDVLSDKTVPQNQGTQKVVKSGKNTANLSLITKLSQEDGAILFPEIDRYSDNKQIKALTQQITKVTVNGTVYKDLISDSVKDTNGWVSNMTGLHLGTKAFKDGENTIVISSKGFEDVTITVTKKDGQIHFVSAKQKQHVTAEDRQSTKLDVTTLEKAIKEADAIIAKESNKDAVKDLAEKLQVIKDSYKEIKDSKLLADTHRLLKDTIESYQAGEVSINNLTEGTYTLNFKANKENSEESSMLQGAFDKRAKLVVKADGTMEISMLNTALGQFLIDFSIESKGTYPAAVRKQVGQKDINGSYIRSEFTMPIDDLDKLHKGAVLVSAMGGQESDLNHYDKYTKLDMTFSKTVTKGWSGYQVETDDKEKGVGTERLEKVLVKLGKDLDGDGKLSKTELEQIRGELRLDHYELTDISLLKHAKNITELHLDGNQITEIPKELFSQMKQLRFLNLRSNHLTYLDKDTFKSNAQLRELYLSSNFIHSLEGGLFQSLHHLEQLDLSKNRIGRLCDNPFEGLSRLTSLGFAENSLEEIPEKALEPLTSLNFIDLSQNNLALLPKTIEKLRALSTIVASRNHITRIDNISFKNLPKLSVLDLSTNEISNLPNGIFKQNNQLTKLDFFNNLLTQVEESVFPDVETLNLDVKFNQIKSVSPKVRALIGQHKLTPQKHIAKLEASLDGEKIKYHQAFSLLDLYYWEQKTNSAIDKELVSVEEYQQLLQEKGSDTVSLLNDMQVDWSIVIQLQKKASNGQYVTVDEKLLSNDPKDDLTGEFSLKDPGTYRIRKALITKKFATQKEHIYLTSNDILVAKGPHSHQKDLVENGLRALNQKQLRDGIYYLNASMLKTDLASESMSNKAINHRVTLVVKKGVSYLEVEFRGIKVGKMLGYLGELSYFVDGYQRDLAGKPVGRTKKAEVVSYFTDVTGLPLADRYGKNYPKVLRMKLIEQAKKDGLVPLQVFVPIMDAISKGSGLQTVFMRLDWASLTTEKAKVVKETNNPQENSHLTSTDQLKGPQNRQQEKTPTSPPSAATGIANLTDLLAKKATGQSTQETSKTDDTDKAEKLKQLVRDHQTSIEGKTAKDTKTKKSDKKHRSNQQSNGEESSSRYHLIAGLSSFMIVALGFIIGRKTLFK

SEQ ID NO: 3 - DNA, 1827 bp, Streptococcus pyogenes
atgtctaaaattattggtattgacttaggtacaacaaactcagcagtagcagttcttgaagggactgaatcaaaaatcattgctaacccagaaggcaatcgtacaactccttcagtagtatcattcaaaaatggtgaaattatcgtgggtgatgctgcaaaacgtcaagcagtgacaaacccagaaacagtaatctctattaaatctaaaatgggaacttctgaaaaagtttctgcaaatggtaaagaatatactcctcaagaaatttcagcaatgattcttcaataccttaaaggttatgctgaagactatcttggagaaaaagtagaaaaagcagttattactgttccagcttacttcaacgatgcacaacgtcaggcaactaaagacgctggtaaaattgcaggtcttgaagtagaacgtatcgttaacgaaccaacagcagccgcacttgcttatggtatggataagactgacaaggatgaaaaaatcttagtttttgaccttggtggtggtacatttgacgtatcaatccttgaattaggtgatggtgtcttcgacgttcttgcaacagcaggtgataacaaacttggtggtgacgactttgaccaaaaaattattgatttcttagtggctgaatttaagaaagaaaatggcattgacttatcacaagataagatggcacttcaacgcttgaaagatgctgctgaaaaagctaaaaaagatctttcaggtgtgacacaaacacaaatttcattaccgttcatcactgctggttctgccggtcctcttcacttggagatgagcttatctcgtgctaaatttgacgatctcactcgcgaccttgtagaacgtacgaaaactccagttcgtcaagccctttcagatgcaggattgtcattgtcagaaattgatgaagttatccttgttggtggatcaactcgtatcccagcagttgtcgaagctgtaaaagctgaaactggtaaagaaccaaataaatctgtaaaccctgatgaagtggttgctatgggtgctgctatccaaggtggtgttatcactggggatgtgaaagacgttgtccttcttgacgtaacaccattgtcacttggtattgaaacaatgggtggtgtcttcactaaattgatcgaccgcaatacaactatcccaacatctaaatcacaagtcttctcaacagcagcagacaaccaaccagctgttgatatccatgttcttcaaggtgaacgcccaatggcagcagataacaagactcttggtcgcttccaattgactgatatcccagctgcacctcgtggaatcccacaaattgaagtaacatttgatatcgataaaaacggtattgtttctgtaaaagctaaagaccttggtacgcaaaaggaacaacacatcgttatcaaatcaaacgacggactttctgaagaagaaattgatcgcatgatgaaagacgctgaagctaatgccgaagccgatgcgaaacgtaaagaagaagttgaccttaaaaacgaagttgaccaagctatctttgctactgaaaaaacaatcaaagaaactgaaggtaaaggctttgatacagaacgcgatgcagcgcaatcagctcttgacgagttaaaagctgcgcaagaatctggcaaccttgacgacatgaaagctaaacttgaagcattaaatgaaaaagcgcaagctttggctgttaaaatgtacgagcaagctgcagcagctcaacaagcagcacaaggtgcagaaggtgcacaagctaatgattcagcaaataatgatgatgttgtagatggcgaatttacagaaaagtaa

SEQ ID NO: 4 - protein, 608 aa, Streptococcus pyogenes
MSKIIGIDLGTTNSAVAVLEGTESKIIANPEGNRTTPSVVSFKNGEIIVGDAAKRQAVTNPETVISIKSKMGTSEKVSANGKEYTPQEISAMILQYLKGYAEDYLGEKVEKAVITVPAYFNDAQRQATKDAGKIAGLEVERIVNEPTAAALAYGMDKTDKDEKILVFDLGGGTFDVSILELGDGVFDVLATAGDNKLGGDDFDQKIIDFLVAEFKKENGIDLSQDKMALQRLKDAAEKAKKDLSGVTQTQISLPFITAGSAGPLHLEMSLSRAKFDDLTRDLVERTKTPVRQALSDAGLSLSEIDEVILVGGSTRIPAVVEAVKAETGKEPNKSVNPDEVVAMGAAIQGGVITGDVKDVVLLDVTPLSLGIETMGGVFTKLIDRNTTIPTSKSQVFSTAADNQPAVDIHVLQGERPMAADNKTLGRFQLTDIPAAPRGIPQIEVTFDIDKNGIVSVKAKDLGTQKEQHIVIKSNDGLSEEEIDRMMKDAEANAEADAKRKEEVDLKNEVDQAIFATEKTIKETEGKGFDTERDAAQSALDELKAAQESGNLDDMKAKLEALNEKAQALAVKMYEQAAAAQQAAQGAEGAQANDSANNDDVVDGEFTEK

SEQ ID NO: 5 - DNA, 1275 bp, Streptococcus pyogenes
atgaaaattggaaaaaaaatagttttaatgttcacagctattgtgttaacaactgtcttggcattaggtgtctatctaactagtgcttataccttctcaacaggagaattatcaaagacctttaaagatttttcgacatcttcaaacaaaagtgatgccattaaacaaacaagagctttttctatcttgttgatgggtgttgatacaggctcttcagagcgtgcctccaagtgggaaggaaacagtgattcgatgattttggttacggttaatccaaagaccaagaaaacaactatgactagtttagaacgagataccttaaccacgttatctggacccaaaaataatgaaatgaatggtgttgaagctaagcttaacgctgcttatgcagcaggtggcgctcagatggctattatgaccgtgcaagatcttttgaatatcaccattgataactatgttcaaattaatatgcaaggccttattgatcttgtgaatgcagttggagggattacagttacaaatgagtttgattttcctatctcgattgctgaaaacgaacctgaatatcaagctactgttgcgcctggaacacacaaaattaacggtgaacaagctttggtttatgctcgtatgcgttatgatgatcctgagggagattatggtcgacaaaagcgtcaacgtgaagtcattcaaaaggtattgaaaaaaatccttgctcttgatagcattagctcttatcggaagattttatctgctgtaagtagtaatatgcaaacgaatatcgaaatctcttctcgcactatccctagtctattaggttatcgtgacgcacttagaactattaagacttatcaactaaaaggagaagatgccactttatcagatggtggatcataccaaattgttacctctaatcatttgttagaaatccaaaatcgtatccgaacagaattaggacttcataaggttaatcaattaaaaacaaatgctactgtttatgaaaatttgtatgggtcaactaagtctcagacagtaaacaacaactatgactcttcaggccaggctccatcttattctgatagtcatagctcttacgctaattattcaagtggagtagataccggccagagtgctagtacagaccaggactctactgcttcaagccataggccagctacgccgtcttcttcatcagatgctttagcagctgatgagtctagctcatcagggtctggatcattagttcctcctgctaatatcaaccctcagacctaa

SEQ ID NO: 6 - protein, 424 aa, Streptococcus pyogenes
MKIGKKIVLMFTAIVLTTVLALGVYLTSAYTFSTGELSKTFKDFSTSSNKSDAIKQTRAFSILLMGVDTGSSERASKWEGNSDSMILVTVNPKTKKTTMTSLERDTLTTLSGPKNNEMNGVEAKLNAAYAAGGAQMAIMTVQDLLNITIDNYVQINMQGLIDLVNAVGGITVTNEFDFPISIAENEPEYQATVAPGTHKINGEQALVYARMRYDDPEGDYGRQKRQREVIQKVLKKILALDSISSYRKILSAVSSNMQTNIEISSRTIPSLLGYRDALRTIKTYQLKGEDATLSDGGSYQIVTSNHLLEIQNRIRTELGLHKVNQLKTNATVYENLYGSTKSQTVNNNYDSSGQAPSYSDSHSSYANYSSGVDTGQSASTDQDSTASSHRPATPSSSSDALAADESSSSGSGSLVPPANINPQT

SEQ ID NO: 7 - DNA, 2166 bp, Streptococcus pyogenes
gtgattacaattaaaaatccaaaaatccttaagtggctaaagtatgtattaagtgcaattcttagccttattatccttgttattattattggtggtcttttgtttaccttctacattagcagtgctccgaaactgtcagaagcccagttaaaatcaacaaactctagcttggtttatgacggtaataacaatctgattgctgatttgggttctgaaaagcgtgaaaatgtaacagctgatagtatccctattaatctagttaatgctattacctcaattgaagataaacgtttctttaaccatcgtggagtagatctttatcgtatttttggtgctgcctttcataatctaacgagtcagaccactcaaggggggtcaacgcttgatcagcaactcattaaactagcctatttttctactaatgaatctgatcaaaccttaaaacgtaaggctcaagaagtttggcttgctcttcaaatggagcgaaaatatactaaacaagaaatcctgactttttacatcaacaaagtatatatgggtaatggcaactatggtatgctgacagccgctaagtcttattatggcaaggatcttaaggatttatcttatgcccaactagccctattggctggaatccctcaagctcctagtcaatatgatccttaccttcatcctgaagctgctcaaaatcgccgtaacgtcgtgttgcaacagatgtacatggaaaaacatctgacgaaagcagaatatgaaactgccatcgcaactcccgtcgctgaaggtctacaatcactccaacagcgctcaacttatccaaaatatatggataattatctaaaacaagttattgaagaagtcaaaaaagaaacgaataaagatatttttaccgctggtttaaaagtttataccaatattatccccgatgcgcagcagactctttataatatttatcattctggtgattatgtttactatccagaccaagatttccaagttgcttcaacgattgttgatgtgacaaatggtcatgttattgctcagcttggcggacgtaatcaagatgaaaatgtttcatttgggactaaccaagctgttttaactgatcgtgactggggttctaccatgaagccaatcacagcctatgctcctgctattgaatctggtgtttatacttctactgctcagtcgactaatgactcagtctattattggcctggaaccactacccaattgtttaactgggaccttagatataacggatggatgacaatccaagctgctattatgctatcgcgaaatgtcccagcagtccgagcactggaagccgcaggacttgactatgctcgatctttcttaagcagtttaggtattaactatcccgaaatgcactactcaaacgctatctcaagtaataacagtagctcagataaaaaatatggtgcaagtagtgaaaaaatggccgctgcatacgctgcttttgcaaatggtggtatttatcataaaccaaggtatgtcaataaagtggaatttagtgatggtacaagtaaaacttttgatgaaaaaggaaaacgtgccatgaaagaaaccacggcctatatgatgacagatatgttaaaaactgttctcacttatggtacaggtactgctgctgccattcctggtgttgcgcaagctggtaaaacagggacttctaactacactgatgaggaactagctaaaattggtgaaaaatacggcctttatccagattatgttggtacattagcgccagacgaaaactttgttggctttactaagcgctacgccatggctgtttggacaggttacaaaaaccgcttgaccccagtatacggatcaagtctagagattgcatctgacgtttatcgtagcatgatgacttacttaacaaatggttacagtgaagattggacgatgccaaatggtctttatcgcagtggtggattcctctacttaagcggaacctatgcgagcaacaccgactatactaattcggtttacaacaatctttacagcaataacacgacaacagcttctagccaaacgacttcagatgatactagtagtagcaatgatacaagtaattcaaccaatacagacaacaatggcagtcatccatctaccgatgataaaaagacaactcattaa

SEQ ID NO: 8 - protein, 721 aa, Streptococcus pyogenes
MITIKNPKILKWLKYVLSAILSLIILVIIIGGLLFTFYISSAPKLSEAQLKSTNSSLVYDGNNNLIADLGSEKRENVTADSIPINLVNAITSIEDKRFFNHRGVDLYRIFGAAFHNLTSQTTQGGSTLDQQLIKLAYFSTNESDQTLKRKAQEVWLALQMERKYTKQEILTFYINKVYMGNGNYGMLTAAKSYYGKDLKDLSYAQLALLAGIPQAPSQYDPYLHPEAAQNRRNVVLQQMYMEKHLTKAEYETAIATPVAEGLQSLQQRSTYPKYMDNYLKQVIEEVKKETNKDIFTAGLKVYTNIIPDAQQTLYNIYHSGDYVYYPDQDFQVASTIVDVTNGHVIAQLGGRNQDENVSFGTNQAVLTDRDWGSTMKPITAYAPAIESGVYTSTAQSTNDSVYYWPGTTTQLFNWDLRYNGWMTIQAAIMLSRNVPAVRALEAAGLDYARSFLSSLGINYPEMHYSNAISSNNSSSDKKYGASSEKMAAAYAAFANGGIYHKPRYVNKVEFSDGTSKTFDEKGKRAMKETTAYMMTDMLKTVLTYGTGTAAAIPGVAQAGKTGTSNYTDEELAKIGEKYGLYPDYVGTLAPDENFVGFTKRYAMAVWTGYKNRLTPVYGSSLEIASDVYRSMMTYLTNGYSEDWTMPNGLYRSGGFLYLSGTYASNTDYTNSVYNNLYSNNTTTASSQTTSDDTSSSNDTSNSTNTDNNGSHPSTDDKKTTH

SEQ ID NO: 9 - DNA, 1470 bp, Streptococcus pyogenes
gtgtcagaagaaagcaaagaagtcgaagtaacaaaagaatcgcaaacattggggcttaatgaagccaagtcaatgacaattggtgaagctgtacgcaaacagtcagagataaaagcaggtgttactaaggatgatagtattttagataagtacattaagcaacaccgtgacgaagtttcttctcaaaagtttgatgctaagtatacagagcttgatacagctagtttagataactttatcaaaaaacaaagagaagcattgagtaaagccggtcttgttgatgacgaacctgtgtctgcggagtctgctgagcaagatagcactttggttgaagaagtagctgaagacttagctccaatggagactactgcggtggtaactgggattccggtggaagcgacagtccctgtgttagatctagatccatcagagagggtcattccagaaccacagatgaccaaggaagaaccaaaaagagatcagtttctttctgaagatagccaccatccagccaaacaaaacacgaaaaaaggttggttaatagctttatttctgctattattggccattcttgcagttgtatttggttggaaccatttcttgagacaagacagtggtaaaacaactcaaacagcaagtaaacagacaaagacctctttgcagaccgacagtgctaaaaaagcaacgcgcttgaaggctgctgctaaagctttcgaaaaactatatggtactttttatacagatgccacaaagagcaaattaaaaaatagtgcctttgctactttgccagatttagaagctgccttgaaagctttggaaggctctgcttactatgataaggcgaaagcaaaagtcgattcccttaagaaagctattgctgctattacagcggttaacggtaaatttgtttccgatgttgttgtagatggtgaaaaggtttcggctgaagtcaaggctgatgctaattttgatgatttatcaagtgcaaccttgacaataggaaatgcaaatcttgatgctgtcttgcaggcaagcatcacagaaggtcgtcagcaactagccagcaaggctgaggccgctaaagcagctaatgagcaagcagtccaggatcaagcagctcaaggacaaagtacatcagtagcaccatctggctatggcttgacaagttatgatcctgcaagcttacaacggcatttatcacgtgtaccttacaatcaagatgttattgctgacagagctaacccatcttgggcatttaatccaggagttcttgaaaaaattgtagcaacctcacaagctagaggttatatttcaggcaaccaatatattttagagccggttaatattattaatggcaatggttactataatatgtttaagcctgatggcacttatctgttctctattaattgtaagacgggttattttgtaggaaatggcaaaggttatgctgatgctttagattactga

SEQ ID NO: 10 - protein, 489 aa, Streptococcus pyogenes
MSEESKEVEVTKESQTLGLNEAKSMTIGEAVRKQSEIKAGVTKDDSILDKYIKQHRDEVSSQKFDAKYTELDTASLDNFIKKQREALSKAGLVDDEPVSAESAEQDSTLVEEVAEDLAPMETTAVVTGIPVEATVPVLDLDPSERVIPEPQMTKEEPKRDQFLSEDSHHPAKQNTKKGWLIALFLLLLAILAVVFGWNHFLRQDSGKTTQTASKQTKTSLQTDSAKKATRLKAAAKAFEKLYGTFYTDATKSKLKNSAFATLPDLEAALKALEGSAYYDKAKAKVDSLKKAIAAITAVNGKFVSDVVVDGEKVSAEVKADANFDDLSSATLTIGNANLDAVLQASITEGRQQLASKAEAAKAANEQAVQDQAAQGQSTSVAPSGYGLTSYDPASLQRHLSRVPYNQDVIADRANPSWAFNPGVLEKIVATSQARGYISGNQYILEPVNIINGNGYYNMFKPDGTYLFSINCKTGYFVGNGKGYADALDY

SEQ ID NO: 11 - DNA, 861 bp, Streptococcus pyogenes
ttgcggttatggttcgttatgaataatcgtcatttatttagtgggatatttttctttgttattagtttatgtctggcctttttattgctaaatattattatccctaagtcaaattcacgtttgaaaaagagtgattttctgaaaaaagaacaagtagctatccaatatgttgctataggagattcattgacagaaggagtaggtgatctaactcatcaaggtggttttgttcctttgttaacgaatgatctcagtgaatattttaaggctaatgttaatcatcaaaattacggcgtatctggtgataccagtcaacaaattcttgataggatgataaaacaaaagcagatacagttatctttaaaaaaagcagatataatgacgttaaccgttggtggtaatgatgttatggcagttattcggaagaatttagcggatttgcaagtttctagttttagaaagccagctcgtcagtatcaaaaacgattaagacagattatcgagttagccagaaaagataataaagatcttcctatttttattttaggcatctataatccgttttatttgaattttccagaactaactgatatgcaaaaagtgattgatgactggaataccaaaactaaggaggttgttggagaatacgatcgtgtgtactttgtgccaataaatgacctcttgtataaagggataaatggacaagaaggaattgttcattcttcaggagatcaaactacaattgtcaatgatgccttgtttactggggaccattttcacccaaataatactggctatcaaatcatgtcaaatgcagtaatggagaaaattaaaaagcatgaaaaaaaaatcaaaccttaa

SEQ ID NO: 12 - protein, 286 aa, Streptococcus pyogenes
MRLWFVMNNRHLFSGIFFFVISLCLAFLLLNIIIPKSNSRLKKSDFLKKEQVAIQYVAIGDSLTEGVGDLTHQGGFVPLLTNDLSEYFKANVNHQNYGVSGDTSQQILDRMIKQKQIQLSLKKADIMTLTVGGNDVMAVIRKNLADLQVSSFRKPARQYQKRLRQIIELARKDNKDLPIFILGIYNPFYLNFPELTDMQKVIDDWNTKTKEVVGEYDRVYFVPINDLLYKGINGQEGIVHSSGDQTTIVNDALFTGDHFHPNNTGYQIMSNAVMEKIKKHEKKIKP

SEQ ID NO: 13 - DNA, 696 bp, Streptococcus pyogenes
atggtaaaattggttttcgctcgccacggtgagtcagaatggaacaaagctaacctcttcactggttgggcagatgttgatctttcagaaaaagggacacaacaagcgattgatgcaggtaaattgatcaaagaagcaggtattgaatttgaccttgctttcacttcagtattgacacgtgctatcaaaacaactaaccttgcccttgaaaatgcaggtcaattgtgggttccaactgaaaaatcatggcgcttgaacgagcgtcactatggtgctttgactggcaaaaacaaagctgaagctgcagaacaattttgtgatgaacaagttcatatctggcgtcgttcatacgacgtgttgccgccagctatggctaaagatgatgagtattcagcacacaaagaccgtcgttatgctgatcttgacccagcccttattccagatgctgaaaacttaaaagtcactcttgaacgcgcaatgccttactgggaagaaaaaattgctccagctcttcttgacggtaaaaacgtctttgttggcgcacatggtaactcaatccgcgctcttgtgaaacacattaaaggtctttcagatgacgaaatcatggatgtggaaattccaaacttcccaccacttgtttttgaattagatgaaaaacttaacattgttaaagaatactaccttggtggtgaataa

SEQ ID NO: 14 - protein, 231 aa, Streptococcus pyogenes
MVKLVFARHGESEWNKANLFTGWADVDLSEKGTQQAIDAGKLIKEAGIEFDLAFTSVLTRAIKTTNLALENAGQLWVPTEKSWRLNERHYGALTGKNKAEAAEQFCDEQVHIWRRSYDVLPPAMAKDDEYSAHKDRRYADLDPALIPDAENLKVTLERAMPYWEEKIAPALLDGKNVFVGAHGNSIRALVKHIKGLSDDEIMDVEIPNFPPLVFELDEKLNIVKEYYLGGE

SEQ ID NO: 15 - DNA, 1056 bp, Streptococcus pyogenes
atgaaaaactcaaataaactcattgctagtgttgtgacattggcctcagtgatggctttagcagcttgtcaatcaactaatgacaatactaaggttatttcgatgaaaggtgatacaattagcgttagtgatttttacaatgaaacaaaaaacacagaagtatcgcaaaaagcgatgctaaatctggtaattagtcgtgtttttgaagctcaatatggtgataaggtttcaaaaaaagaagttgaaaaggcgtatcataaaacagctgaacagtatggcgcttcattctctgctgctttggcacaatcaagcttgacacctgagacttttaagcgtcagatccgctcttcaaaattagtagaatatgcggttaaagaagcagctaaaaaagaattgacaacacaagaatataagaaagcatatgaatcttatactccaacaatggcagtcgaaatgattactttagataatgaagagacagctaaatcagtcttagaggaactaaaagccgaaggcgcagactttacagctattgctaaagaaaaaacaacaacacctgagaaaaaagtgacctataaatttgattcaggtgcgacaaatgtaccgactgatgtcgtaaaagcggcttcaagtttgaatgagggtggcatatcagacgttatctcggttttagatccaacttcttatcaaaagaagttttacattgttaaggtgactaaaaaagcagaaaaaaaatcagattggcaagaatataagaaacgtttgaaagctatcattatagctgaaaaatcaaaagatatgaatttccaaaacaaggttattgcaaatgcattggataaagctaatgtaaaaattaaagacaaagcttttgctaatattttggcgcaatatgcaaatcttggtcaaaaaactaaagctgcaagtgaaagttcaacaaccagcgaatcatcaaaagctgcagaagagaacccatcagaatcagagcaaacacagacatcatcagctgaagaaccaactgagactgaggctcagacgcaagagccagctgcacaataa

SEQ ID NO: 16 - protein, 351 aa, Streptococcus pyogenes
MKNSNKLIASVVTLASVMALAACQSTNDNTKVISMKGDTISVSDFYNETKNTEVSQKAMLNLVISRVFEAQYGDKVSKKEVEKAYHKTAEQYGASFSAALAQSSLTPETFKRQIRSSKLVEYAVKEAAKKELTTQEYKKAYESYTPTMAVEMITLDNEETAKSVLEELKAEGADFTAIAKEKTTTPEKKVTYKFDSGATNVPTDVVKAASSLNEGGISDVISVLDPTSYQKKFYIVKVTKKAEKKSDWQEYKKRLKAIIIAEKSKDMNFQNKVIANALDKANVKIKDKAFANILAQYANLGQKTKAASESSTTSESSKAAEENPSESEQTQTSSAEEPTETEAQTQEPAAQ

SEQ ID NO: 17 - DNA, 1275 bp, Streptococcus pyogenes
ttgaaaaaattaaatgttattcttgttggtttattaagcattctgatgttgagtttagctattgtgtttattaatcgttggaaactaaacgaagatagtcagcgtatagttttggctgaaaagaaaaaaaacacgtcagatttagtgatcaaagctgtaaaacatattaaaaaagatcaaaaagactattattatttttccccgataaaacaagcagatgatttttttgtagataatttacctgtttcattatacaaaaaaaagaattcagataaagaattgattttagtaaggcctaaactgcaatcttctcacctaagatcagttaacactttgactatttctaaaatagtttatcagaaaaaattttttcatttggctaaaaaatcagaaaaagttataagtacatatcacgttacagacgacttgaaaccgtttcaggtaaaggatctagtatcaggacatttagaaagaatacaagaagaagttgaaaaaaaatatccagatgctggttttaatagcgataagtataatggcttaaaagaatctaattctttattaagcgatggctttgaggtaaaatcgggaaaccttatttttgataaaaagctaacgatacctttgacgacattatttgatgttattaatccagattttttagcaaatagcgatagagctgcgtatgataattataggacctacaaagaacagcatcccaaaaaactagttgcattaacgtttgatgatggtccagatccgacgacgactcctcaagttttagatattttggcaaaataccaggctaagggaactttctttatgataggttcaaaggttgtgaataatgaaaaccttactaaacgtgttagcgacgctggccatgaaattgctaatcatacttgggatcatcctaatctgactaatctttcagtcagcgagattcaacatcaagttaatatgacgaaccaggctattgaaaaagcttgtggcaagaaacctcgctatttacgccctccatacggagctacaaatgcaactgttcagcaatcctcaggattaacacaaatgctttggacggttgatacaagagattgggaaaatcatagcactgatggcattatgactaatgtcaaaaaccaattgcaaccgggaggagttgttttaatgcatgatattcatcaaacaactatcaatgctttgccgacagttatggaatatctaaaagcagaaggatacgaatgtgtgactgtatcagaactctatgcgcatcagtaa

SEQ ID NO: 18 - protein, 424 aa, Streptococcus pyogenes
MKKLNVILVGLLSILMLSLAIVFINRWKLNEDSQRIVLAEKKKNTSDLVIKAVKHIKKDQKDYYYFSPIKQADDFFVDNLPVSLYKKKNSDKELILVRPKLQSSHLRSVNTLTISKIVYQKKFFHLAKKSEKVISTYHVTDDLKPFQVKDLVSGHLERIQEEVEKKYPDAGFNSDKYNGLKESNSLLSDGFEVKSGNLIFDKKLTIPLTTLFDVINPDFLANSDRAAYDNYRTYKEQHPKKLVALTFDDGPDPTTTPQVLDILAKYQAKGTFFMIGSKVVNNENLTKRVSDAGHEIANHTWDHPNLTNLSVSEIQHQVNMTNQAIEKACGKKPRYLRPPYGATNATVQQSSGLTQMLWTVDTRDWENHSTDGIMTNVKNQLQPGGVVLMHDIHQTTINALPTVMEYLKAEGYECVTVSELYAHQ

SEQ ID NO: 19 - DNA, 1251 bp, Streptococcus pyogenes
atgcttaagagactctggttaattctaggtcctcttcttattgcctttgttttagtagtgattactatttttagttttcctacacaacttgatcattccatagctcaggaaaaagcaaatgccgttgcgatcacagatagttcttttaaaaatggtttgattaaaagacaagctttatcagatgagacttgtcgttttgtgcctttttttggttctagcgaatggagtcgaatggatagtatgcacccttcggtgcttgcagagcgctacaagcggagctatagaccatttttaattggtaagagaggatcagcatctttgtcgcattattatggtatacaacaaattaccaatgaaatgcaaaagaaaaaagccatctttgtagtatctcctcaatggtttactgctcaagggattaatcctagtgcggttcagatgtacttgtctaacactcaagtgattgaatttttactaaaagctagaactgataaagaatcacagtttgcagcaaagcgtttgcttgagcttaaccctggtgtgtctaaatcaaacttattgaaaaaagtaagtaagggtaagtctcttagtcggttagacagagctattttgaaatgtcaacatcaagtagcattgagagaagagtccctttttagttttttaggcaaatctactaactatgaaaaaagaattttgcctcgcgttaagggattacctaaagtattttcgtataaacaattgaatgcattagcaactaagagaggccaattagcaacaaccaacaaccgttttgggattaaaaatacattttatcgtaaacgaatagcacctaaatacaatctttataagaatttccaagttaattatagttacctggcgtcaccagaatacaatgattttcagcttttattatcagaatttgctaaacgaaaaacagatgtactctttgttataactcctgttaataaagcttgggcggattataccggcttaaatcaagataagtatcaagcggcagttcgtaaaataaaattccagttaaagtcacaaggatttcatcgcattgctgacttctcaaaagatggtggtgagtcctactttatgcaagataccatccatctcggttggaatggctggttagcttttgataagaaagtgcaaccatttctagaaacgaagcagccagtgcccaactataaaatgaacccttatttttatagtaaaatttgggcaaataggaaagacttgcaatag

SEQ ID NO: 20 - protein, 416 aa, Streptococcus pyogenes
MLKRLWLILGPLLIAFVLVVITIFSFPTQLDHSIAQEKANAVAITDSSFKNGLIKRQALSDETCRFVPFFGSSEWSRMDSMHPSVLAERYKRSYRPFLIGKRGSASLSHYYGIQQITNEMQKKKAIFVVSPQWFTAQGINPSAVQMYLSNTQVIEFLLKARTDKESQFAAKRLLELNPGVSKSNLLKKVSKGKSLSRLDRAILKCQHQVALREESLFSFLGKSTNYEKRILPRVKGLPKVFSYKQLNALATKRGQLATTNNRFGIKNTFYRKRIAPKYNLYKNFQVNYSYLASPEYNDFQLLLSEFAKRKTDVLFVITPVNKAWADYTGLNQDKYQAAVRKIKFQLKSQGFHRIADFSKDGGESYFMQDTIHLGWNGWLAFDKKVQPFLETKQPVPNYKMNPYFYSKIWANRKDLQ

SEQ ID NO: 21 - DNA, 2136 bp, Streptococcus pyogenes
atgagagaattacatatcaaaacttataagttattaacgaaaagtgctgttttacttggcttaatttcatttccactaactgtttctgctgccgataatgcttctgtcaccaacaaagcagatttttcaacagatacgatttatcagattgtaacagatcgttttaacgatggtaatacctctaataatggtaagactgatgtttttgataaaaatgaccttaaaaaataccatggaggtgattggcaaggaatcatcgccaagattaaggatggttacctgacagatatggggatttctgccatttggatttcttctcctgttgaaaatatcgacagtattgatccttctaatggaagtgctgcatatcatgggtattgggctaaggacttctttaaaacaaaccagcattttggcactgaagcagactttcaacaactagtcaaagtagctcatcaacaccatattaaggtagttattgattttgctcctaatcatacgtctacagccgaaaaagaaggcacaactttcaaagaagatggcgctttatataaaaacggtaaattagttggtaaattttcagatgataaagacaagatttttaatcatgaatcttggaccgattttagtacttatgaaaattctatttatcattcaatgtacggactagctgatttaaataacattaatccgaaagttgaccagtacatgaaagaagctattgataaatggttagacctgggtgttgatggtatccgagttgacgctgttaaacatatgtcacaaggttggcaaaaaaattggttgagtcatatctatgaaaaacataatgtctttgttttcggggaatggttctcgggacataccgacgatgattatgatatgacgacatttgctaacaatagtgggatggggcttttagattttagatttgccaatgctattagacagttgtatacaggtttttcaacgtttaccatgcgagatttttacaaggttcttgaaaatagagatcaggtgactaatgaagtgacagaccaggtgacctttattgataatcatgatatggaacgcttcgcaacaaaagtggctaataatcaaactgctgttaatcaagcctatgctttgcttttaacatctagaggtgtgcctaatatttattatggtacagagcagtatgcaacaggtgataaagatcctaataatcgtggtgatatgccaagttttaataaagagtcacaagcctataaagtgattagtaagctagctcctttaagaaaacaaaatcaagctttagcttatggaacaactgaacaacgttggattagtgatcatgttttggtatttgagcgtaaatttggtaatcatgtcgcactagtggctattaatagagatcaaacgaatggttatacaattactaatgctaaaacagccttgccccaaaatagctacaaggacaaattagaaggtcttcttggcggtcaagaattaatagttggagcagatggcactattagtagctttgaacttggagcggggcaagtcgctgtatggacttatgaaggagaggacaagacaccacaacttggagatgtcgatgcttcagtgggtattgctggaaataagattactatttcaggtcaaggttttggtaattctaaaggtcaagtgacttttggagaaatctctgctgagatcctttcttggtcagatacccttatcaccttaaaagtaccgacggttccagcaaattattataacatttcagtgacaactgccgataagcaaaccagcaatagttaccaagcctttgaagtattgactgataaacaaattcctgttcgtttactcatcaatgattttaagacagtaccaggggaacaactatatctcatgggtgatgtttttgagatgggggcaaatgacgctaagaatgctgttggtcctctatttaataacactcagaccattgccaagtacccaaactggttctttgatactcatctaccaatcaataaagaaatagcagtcaaacttgttaaaaaagatagtattgggaatgttttatggacaagtcctgagacttatagtataaagacaggtcatgaagcacaaaccattactataaaaaaataa

SEQ ID NO: 22 - protein, 711 aa, Streptococcus pyogenes
MRELHIKTYKLLTKSAVLLGLISFPLTVSAADNASVTNKADFSTDTIYQIVTDRFNDGNTSNNGKTDVFDKNDLKKYHGGDWQGIIAKIKDGYLTDMGISAIWISSPVENIDSIDPSNGSAAYHGYWAKDFFKTNQHFGTEADFQQLVKVAHQHHIKVVIDFAPNHTSTAEKEGTTFKEDGALYKNGKLVGKFSDDKDKIFNHESWTDFSTYENSIYHSMYGLADLNNINPKVDQYMKEAIDKWLDLGVDGIRVDAVKHMSQGWQKNWLSHIYEKHNVFVFGEWFSGHTDDDYDMTTFANNSGMGLLDFRFANAIRQLYTGFSTFTMRDFYKVLENRDQVTNEVTDQVTFIDNHDMERFATKVANNQTAVNQAYALLLTSRGVPNIYYGTEQYATGDKDPNNRGDMPSFNKESQAYKVISKLAPLRKQNQALAYGTTEQRWISDHVLVFERKFGNHVALVAINRDQTNGYTITNAKTALPQNSYKDKLEGLLGGQELIVGADGTISSFELGAGQVAVWTYEGEDKTPQLGDVDASVGIAGNKITISGQGFGNSKGQVTFGEISAEILSWSDTLITLKVPTVPANYYNISVTTADKQTSNSYQAFEVLTDKQIPVRLLINDFKTVPGEQLYLMGDVFEMGANDAKNAVGPLFNNTQTIAKYPNWFFDTHLPINKEIAVKLVKKDSIGNVLWTSPETYSIKTGHEAQTITIKK

SEQ ID NO: 23 - DNA, 1248 bp, Streptococcus pyogenes
atgaaatcatggcaaaaagttatcgtcggcggagcaagtttgacacttgcaagtaccttgttagtgggatgtggatcaggttcaaaagataaaaaggaagctggcgctgactcaaagactattaaactttgggtaccgactggctctaaaaaatcatatgcagataccattgcaaaatttgaaaaagattctggttacaccgttaaagtggttgaatcagaagatccaaaagcacaagaaaaaatcaaaaaagatgcctcaactgctgccgatgtcttttcacttcctcatgatcaacttggtcaacttgtagaatctggtactattcaagaagttccagaaaagtacaataaagaaattgctgctacttctactgatcaggcgctcgtcggtgcacagtacaaagggaaaacatatgctttcccatttggtattgaatcacaagttcttttctacaataaatcaaaattagctgctgaagacgttacttcatatgatacaattactacaaaagcaacttttggtggtacctttaaacaagctaacacttacgctactggtccattattcatgtcagttggtaacactttatttggggaaaacggtgaagatgtaaaaggtactaactggggcaatgaaaaaggcgctgctgttcttaaatggatcgcagaccaagcttcaaataaaggttttgttagcttagatgctaacaacgttatgtctaaatttggtgacggttcagtagcttcctttgaatcaggaccgtgggactatgaagctgctcaaaaagctatcggtaaagaaaaccttggtgttgctatttatccaaaagtaactattggaggcgaaacggttcaacaaaaagcattcttgggtgtaaaactttacgcagtcaaccaagcaccagctaaaggtgatacaaaacgtatcgcagctagctacaaattggcatcctacttgactaatgctgaaagccaagaaaaccaattcaaaactcgtaacattgtcccagccaacaaagaagttcaatcttcagaagctgttcaatcaaacgaacttgctaaaaccgttatcactatgggttcttcttcagactacactgtcgtaatgccaaaacttagccaaatgggcacattctggactgaaagtgctgctattcttagtgatgccttcaacggtaaaatcaaagaaaacgactaccttactaagttgcaacaattcgacaaagatatcgctgcaacaaaataa

SEQ ID NO: 24 - protein, 415 aa, Streptococcus pyogenes
MKSWQKVIVGGASLTLASTLLVGCGSGSKDKKEAGADSKTIKLWVPTGSKKSYADTIAKFEKDSGYTVKVVESEDPKAQEKIKKDASTAADVFSLPHDQLGQLVESGTIQEVPEKYNKEIAATSTDQALVGAQYKGKTYAFPFGIESQVLFYNKSKLAAEDVTSYDTITTKATFGGTFKQANTYATGPLFMSVGNTLFGENGEDVKGTNWGNEKGAAVLKWIADQASNKGFVSLDANNVMSKFGDGSVASFESGPWDYEAAQKAIGKENLGVAIYPKVTIGGETVQQKAFLGVKLYAVNQAPAKGDTKRIAASYKLASYLTNAESQENQFKTRNIVPANKEVQSSEAVQSNELAKTVITMGSSSDYTVVMPKLSQMGTFWTESAAILSDAFNGKIKENDYLTKLQQFDKDIAATK

SEQ ID NO: 25 - DNA, 837 bp, Streptococcus pyogenes
atgattataaaaaaaagaaccgtagcaattttagccatagctagtagctttttcttggtagcttgtcaagctactaaaagtcttaaatcaggagatgcttggggagtttaccaaaagcaaaaaagtattacagttggttttgacaatacgtttgttcctatgggctataaggatgaaagcggcagatgcaaaggttttgatattgatttggctaaagaagtttttcaccaatatggactcaaggttaactttcaagctattaattgggacatgaaagaagcagaactaaacaatggtaaaattgatgtaatctggaatggttattcaataactaaggagcgtcaggataaggttgcctttactgattcttacatgagaaatgaacaaattattgttgtcaaaaaaagatctgatattaaaacaatatcagatatgaaacataaagtgttaggagcacaatcagcttcatcaggttatgactccttgttaagaactcctaaactgctgaaagattttattaaaaataaagacgctaatcaatatgaaacctttacacaagcttttattgatttaaaatcagatcgtatcgatggaatattgattgacaaagtatatgccaattactatttagcaaaagaagggcaattagagaattatcggatgatcccaacgacctttgaaaatgaagcattttcggttggacttagaaaagaagacaaaacgttgcaagcaaaaattaatcgtgctttcagggtgctttatcaaaatggcaaatttcaagctatttctgagaaatggtttggagatgatgttgccactgccaatattaaatcttaa

SEQ ID NO: 26 - protein, 278 aa, Streptococcus pyogenes
MIIKKRTVAILAIASSFFLVACQATKSLKSGDAWGVYQKQKSITVGFDNTFVPMGYKDESGRCKGFDIDLAKEVFHQYGLKVNFQAINWDMKEAELNNGKIDVIWNGYSITKERQDKVAFTDSYMRNEQIIVVKKRSDIKTISDMKHKVLGAQSASSGYDSLLRTPKLLKDFIKNKDANQYETFTQAFIDLKSDRIDGILIDKVYANYYLAKEGQLENYRMIPTTFENEAFSVGLRKEDKTLQAKINRAFRVLYQNGKFQAISEKWFGDDVATANIKS

SEQ ID NO: 27 - DNA, 249 bp, Streptococcus pyogenes
ttggaggtgaaaacattggcaaatattaaatcagctattaaacgcgctgaacttaacgttaaagcaaacgaaaaaaactcagcacaaaaatcagctatgcgtactgctatcaaagcatttgaagctaacccatctgaagagcttttccgcgctgcttcttcaagcatcgataaagctgaatcaaaaggtttgattcacaaaaacaaagcaagccgcgataaagcacgccttgctgcaaaacttggctaa

SEQ ID NO: 28 - protein, 82 aa, Streptococcus pyogenes
MEVKTLANIKSAIKRAELNVKANEKNSAQKSAMRTAIKAFEANPSEELFRAASSSIDKAESKGLIHKNKASRDKARLAAKLG

SEQ ID NO: 29 - DNA, 351 bp, Streptococcus pyogenes
atgaaaagatatgaagtgactgtcaatggacaggtttatgaagtgagtttacgtgaactagttgatggagaaactgttgaagttagccagccagcagcacccgctactgagaaagaaatgaatgccaacgctgctggcggtggcattcaggtaaaggctccaatgtctggaacagtcttgtctatctttgctacagaaggaaaagctgttaaaaaaggagaagctgttctggtcttagaggccatgaaaatggagaatgaaattctagcacctgcagatggtctggtttcaaaaattcatgttgtggctaaccaaacggtcgagtctgaacaagttttgatttcattctag

SEQ ID NO: 30 - protein, 116 aa, Streptococcus pyogenes
MKRYEVTVNGQVYEVSLRELVDGETVEVSQPAAPATEKEMNANAAGGGIQVKAPMSGTVLSIFATEGKAVKKGEAVLVLEAMKMENEILAPADGLVSKIHVVANQTVESEQVLISF

SEQ ID NO: 31 - DNA, 750 bp, Streptococcus pyogenes
atggtaaaaaaacaaaagcgtcgaaaaataaaatccatgtcttgggcaagaaaactactaatagctgtacttttaattctaggtttagcattgctttttaacaaacctatccgaaatacattaattgctcgaaactctaataaatatcaagtaacgaaagtttcgaaaaaacaaatcaaaaagaataaagaggctaagtcaacatttgatttccaagccgtagagccagttagtacagagagtgtcttgcaagcacaaatggcggctcagcaacttcctgttatagggggcattgccataccagagcttggcattaatttaccaatttttaaaggtttaggaaatactgagcttatttatggcgcaggaacgatgaaagaagaacaagttatgggaggagaaaataattattctcttgccagtcatcatatttttggaattacaggttcatctcaaatgctcttttcgccgcttgaaagagcacaaaatgggatgtccatctatttaacagataaagaaaaaatttacgaatacatcataaaagatgttttcacggtagctcctgaacgcgttgatgttatcgatgatacagctggtctcaaagaagtgactttagtgacttgtacagatatcgaagcaacagaacgtattattgtcaaaggagaactaaaaacagaatacgattttgataaagcgcccgccgatgtattgaaagcttttaatcattcttataaccaagtatctacctag

SEQ ID NO: 32 - protein, 249 aa, Streptococcus pyogenes
MVKKQKRRKIKSMSWARKLLIAVLLILGLALLFNKPIRNTLIARNSNKYQVTKVSKKQIKKNKEAKSTFDFQAVEPVSTESVLQAQMAAQQLPVIGGIAIPELGINLPIFKGLGNTELIYGAGTMKEEQVMGGENNYSLASHHIFGITGSSQMLFSPLERAQNGMSIYLTDKEKIYEYIIKDVFTVAPERVDVIDDTAGLKEVTLVTCTDIEATERIIVKGELKTEYDFDKAPADVLKAFNHSYNQVST

SEQ ID NO: 33 - DNA, 381 bp, Streptococcus pyogenes
ttggaggaaatcacaatggcattgaacattgaaaacattattgctgaaattaaagaagcttcaatccttgagcttaacgatcttgtaaaagctatcgaagaagaatttggtgtaactgcagctgctcctgtagctgctgcagctgctggtggtgctgaagaagctgctaaagattcattcgacgttgaattgacatctgctggcgacaaaaaagttggcgttatcaaagctgttcgtgaaatcacaggtcttggtcttaaagaagctaaaggtcttgttgatggagcacctgctaacgttaaagaaggcgttgctgctgcagaagctgaagaaatcaaagctaaacttgaagaagctggagcaacaatcactcttaaataa

SEQ ID NO: 34 - protein, 126 aa, Streptococcus pyogenes
MEEITMALNIENIIAEIKEASILELNDLVKAIEEEFGVTAAAPVAAAAAGGAEEAAKDSFDVELTSAGDKKVGVIKAVREITGLGLKEAKGLVDGAPANVKEGVAAAEAEEIKAKLEEAGATITLK

SEQ ID NO: 35 - DNA, 1764 bp, Streptococcus pyogenes
atggctgttgaaattattatgccaaaactcggtgttgacatgcaagaaggtgaaatcatcgagtggaaaaaacaagaaggtgatactgtcaatgaaggcgatattcttcttgaaatcatgtcagataaaaccaatatggaacttgaggcagaagactcaggtgttcttcttaaaattacacgtcaagcaggtgaaacagtacctgtaacagaagttatcggatatatcggtgctgaaggtgaatctgttgaggtttctagcccagctgcttcagatgtgaatgttgctcgtacaacagaagatttagaagctgctggacttgaagtgccaaaagcaccagctcaagctgcttcagctgcaccaaaagctgcacttgctgatgatgagtatgacatcatcgttgttggtggtggccctgcaggttattatgcagctattcgtggtgctcaacttggtggtaaaattgccatcgttgagaaatctgaatttggtggaacttgcttgaacgtagggtgtatcccaaccaaaacttaccttaaaaatgctgaaatccttgatggtattaagattgcagcaggacgtgggattaaccttgcctcaactaactatactattgacatggacaaaacagttgactttaaaaacaccgttgttaaaaccttaacaggcggcgttcaaggtcttctaaaagctaataaagtcactatctttaatgggcttggtcaagtcaaccctgacaagactgtaaccattgggtcacaaaccattaagggtcgcaacgttatccttgctacaggttctaaagtatcacgtatcaatatcccaggtattgactctaaacttgtcttaacgtcagatgatatccttgacctccgtgaaatgccaaaatcactagcagttatgggcggtggtgttgttggtatcgagcttggacttgtttgggcatcttacggtgtggatgttaccgttattgaaatggctgaccgtattatcccagctatggataaagaagtctctcttgaacttcaaaaaatcctttctaagaaaggcatgaagatcaaaacatctgttggtgtctctgaaattgttgaagcaaataaccaattgactttgaaacttaacaatggtgaagaagttgttgctgaaaaagctcttctttctatcggacgtgtatcacaaatgaacggtctggaaaatcttaaccttgaaatggatcgtaaccgtatcaaagttaatgactaccaagagacatcaattccaggtatctatgcgccaggtgacgttaacggaacgaaaatgcttgctcacgctgcttaccgtatgggtgaagtggctgcagaaaatgcgatgcatggcaacacaactcgtaaagctaaccttaaatacactccagcagctgtttacacacaccctgaagtggcaatggttggtttaactgaagaacaagcgcgtgaacaatatggtgatgtgcttattggtaaaaacagctttactggtaatggacgcgcgattgcttcaaatgaagcacatggttttgttaaagttattgctgatgccaaataccacgaaatcttaggtgttcatattattggtccagctgcagctgagatgattaacgaagcagctactattatggaatctgaattaaccgttgatgaattgttattatcaattcatggacacccaaccttctctgaagtgatgtacgaagcctttgcagatgtgcttggcgaagctatccataacccaccaaaacgtaagtaa

SEQ ID NO: 36 - protein, 587 aa, Streptococcus pyogenes
MAVEIIMPKLGVDMQEGEIIEWKKQEGDTVNEGDILLEIMSDKTNMELEAEDSGVLLKITRQAGETVPVTEVIGYIGAEGESVEVSSPAASDVNVARTTEDLEAAGLEVPKAPAQAASAAPKAALADDEYDIIVVGGGPAGYYAAIRGAQLGGKIAIVEKSEFGGTCLNVGCIPTKTYLKNAEILDGIKIAAGRGINLASTNYTIDMDKTVDFKNTVVKTLTGGVQGLLKANKVTIFNGLGQVNPDKTVTIGSQTIKGRNVILATGSKVSRINIPGIDSKLVLTSDDILDLREMPKSLAVMGGGVVGIELGLVWASYGVDVTVIEMADRIIPAMDKEVSLELQKILSKKGMKIKTSVGVSEIVEANNQLTLKLNNGEEVVAEKALLSIGRVSQMNGLENLNLEMDRNRIKVNDYQETSIPGIYAPGDVNGTKMLAHAAYRMGEVAAENAMHGNTTRKANLKYTPAAVYTHPEVAMVGLTEEQAREQYGDVLIGKNSFTGNGRAIASNEAHGFVKVIADAKYHEILGVHIIGPAAAEMINEAATIMESELTVDELLLSIHGHPTFSEVMYEAFADVLGEAIHNPPKRK

SEQ ID NO: 37 - DNA, 3636 bp, Streptococcus pyogenes
atgggagaatcttattctgttgaagcggttttgacagctgttgataaaacctttggcaaaacattacaatcggcaatccgttcaatcgatggcttggaaaagcgttcaaccggtttttcatcggtgtctcaaaaagctagttccatgtttaaatccatgttaggagcgaatttagccggacaagctatctcagcaatgacaaggacagtgtcatcaggccttggctctatgcttggcgagatgaatagttcagcgaaagcgtggaaaacttttgacgccaatttagcggacattgggtttggaaaaaaacaaattttggcagctaaaacggcgatgcaagactatgcaactaaaacaatctactcggcatcagatatggctagcacgtatgcacagttagcggcagttggtgtgaaagataccggaaagctcgtaaaagcttttggcggtttagctgcatctgctgaaaacccgaagcaggccatgaagtctatcagtcaacaaatgacgcaagcagtaggaagaccaacagttgcatggcaagactttaggataatgctggaacaggcgcctgcagggatggctaaagtcgctaaatctatgggtaaaaatcttgatgaactcgtcgccgatatccaggcgggtagggttaaaaccagcgattttttggaagcggtaaaaaaagcaggcaatgataagagtttccaaaagatggcaactgagttcaaaactgttgaccaagccatcgacggtatgcgagaaggcttatccaacaaattgcaaccagcgtttgaaaaagtgaaccaatttggaattagagcgatcgaagcaatcggtaaacaactcgataaagttgatttttctaagtttgctagtaatcttgggaaattccttgaaggaattaatatcgataaaattgtatctaatatttcatcggcgatttcatctgtcacttcaaaggttaaagaattttggggcggtttcaaacaaactggagcaattagtgctttttcaggagctttaaaaagtgtttggggagcgttaaaaaatgtagctagcgctatgagtggaggcagttggaaaaactttggctctattgtaggcggaattgtaaagcatgtgtctaattttgcaaaagctattgctgatgttgtcggtaaaatggaacctggcagattgcaaagctggatagccacttttgcagcagtcgggggagggttaaagttatttgaaaagctaacaggacaaagcgttgttggctcttttttagataaaatcagtacaaaatttggattatttggcaaaaaagctaaagaaggaaccgatcaagcagcgaatggctctcgtaaaagtggtggaatcatcagccaaatctttaatggcttgggtaatatcgttaagtctgctggtacagccatatcaacagctgcaaaaggtatcggtacagggattaaaaccgccttgtctggggcacctcctatcattagttctctaggaaccgcaatatcaacagttgcgcaaggtataggcactgggctagcaatcgcttttagaggtttaggagctgcaatcgctatggtgcctcccaccacttggctagctttaggaacggctattttaatggtaggagcggcttttgccttagcaggaactcaggctgatggcattagtcaaattttaaggactattggcgatgttgttgtacaagttttacaacaggtcactgatagtctagccactttactaactattatcgcaaacgctattggctctatgttgccaattgtagctggagctatctctcagattgtaggcgcagtagcgggcggattatctcagctcattatagccgtttcaacaggggtatctctcgttataggagctttcacaggacttcttggtggtatttctggggttattaactccattagcgctgttatccaatcgctaactggtgtgattaccgcagtattcaatggcatagctactgttatttcatctgtcggttcgactatcaaagatgtattgacgggtctaggaaccgcttttgaaggatttgggaatggtgtaaaatcagctctagaaggtgttggggcagtaattgaatcatttggtagtgcagttaggaatgtccttgacggtgttgcaaatatccttgattctatggggactgcggcacttaatgcaggccgtggcgtcaaagagatggctaaaggtattaagatgcttgttgatttatcccttggagatttggttgctacattagcagctgtggcaagcggtctagggaagatggctagctcagctggcgaaatgacaacattaggttctgctatgagcaaagtagccaatggtatgacacgtctagcaacaagtgctacgatagcaattactggattaacagtctttgccaccaccatggcaactattaagacagcagttgcaactctaccgccagtcctaacgatggcagcgagtgggtttaccacatttactactcaggcggtggcagcagtgactggattggctgcaattaatgctccaatcactatgtttaaagctcaactaatgacaataacaccagctctagcacaagctggcgctggctttgccgcgtttgttgctcaatcatcaacatttagtacaggtttagcatctgccggtcctacaatagcagcattcaatgctaatttgatgagcttatctgcaacaacaggagtgctagttgcatcaatagctggtttatcagctgtgctttctgttgtatcagctggctttagccaaataggggcttctgcgacagcaactgttggtcaaatacaagcttttgcttctagtacaacagttgtttcgtcagcatttgctagcatgcaatctatgattcaatctgccatggctgcaatagtaagcagcattataacatcatttaatcaagcggcctctcaaatgcaatcaatcttatctcgaatgctatctcaggccaggacatttgggtctcaactagagcaacaaatgagacaatcgggacagcgttcaggacaaaatcttgctcgggggctatcttctcaacaaggtgctgttattaatgctatttctagcatggttaatgctgcggtatcaagagccaacgcgggagctggtcctatgcgtcaagctggagcgtacatcggacaagggcttgcgcaaggaatgtattcagcgctaggagctgtaacagctgcagcaaacgcccttgtagcacaagccgagagagcagcaagagccaaggcgatgattcattcgccgtcaaggttgtttgcaaaacgagttggtcaatatatcccgcaaggggtagctatgggtatcgacaaaaacgctgatgtcgttgacgactctgttggcgggttatttgatagcatcaatagctttgattttaatatcgcagatagactgactagcattggagctaaattccaaggtgttgtcaaatcagagagttcgcaatcgttatcgcagcaacaagagtttgtacatacagctcaaccagcgtatataaactttagtttaggcggaaacgaatacgaagcatttgtaagtgacatcactaatcaacaagcaaaaattgaaaaaatcagactaaagagaagcagctggtag

SEQ ID NO: 38 - protein, 1211 aa, Streptococcus pyogenes
MGESYSVEAVLTAVDKTFGKTLQSAIRSIDGLEKRSTGFSSVSQKASSMFKSMLGANLAGQAISAMTRTVSSGLGSMLGEMNSSAKAWKTFDANLADIGFGKKQILAAKTAMQDYATKTIYSASDMASTYAQLAAVGVKDTGKLVKAFGGLAASAENPKQAMKSISQQMTQAVGRPTVAWQDFRIMLEQAPAGMAKVAKSMGKNLDELVADIQAGRVKTSDFLEAVKKAGNDKSFQKMATEFKTVDQAIDGMREGLSNKLQPAFEKVNQFGIRAIEAIGKQLDKVDFSKFASNLGKFLEGINIDKIVSNISSAISSVTSKVKEFWGGFKQTGAISAFSGALKSVWGALKNVASAMSGGSWKNFGSIVGGIVKHVSNFAKAIADVVGKMEPGRLQSWIATFAAVGGGLKLFEKLTGQSVVGSFLDKISTKFGLFGKKAKEGTDQAANGSRKSGGIISQIFNGLGNIVKSAGTAISTAAKGIGTGIKTALSGAPPIISSLGTAISTVAQGIGTGLAIAFRGLGAAIAMVPPTTWLALGTAILMVGAAFALAGTQADGISQILRTIGDVVVQVLQQVTDSLATLLTIIANAIGSMLPIVAGAISQIVGAVAGGLSQLIIAVSTGVSLVIGAFTGLLGGISGVINSISAVIQSLTGVITAVFNGIATVISSVGSTIKDVLTGLGTAFEGFGNGVKSALEGVGAVIESFGSAVRNVLDGVANILDSMGTAALNAGRGVKEMAKGIKMLVDLSLGDLVATLAAVASGLGKMASSAGEMTTLGSAMSKVANGMTRLATSATIAITGLTVFATTMATIKTAVATLPPVLTMAASGFTTFTTQAVAAVTGLAAINAPITMFKAQLMTITPALAQAGAGFAAFVAQSSTFSTGLASAGPTIAAFNANLMSLSATTGVLVASIAGLSAVLSVVSAGFSQIGASATATVGQIQAFASSTTVVSSAFASMQSMIQSAMAAIVSSIITSFNQAASQMQSILSRMLSQARTFGSQLEQQMRQSGQRSGQNLARGLSSQQGAVINAISSMVNAAVSRANAGAGPMRQAGAYIGQGLAQGMYSALGAVTAAANALVAQAERAARAKAMIHSPSRLFAKRVGQYIPQGVAMGIDKNADVVDDSVGGLFDSINSFDFNIADRLTSIGAKFQGVVKSESSQSLSQQQEFVHTAQPAYINFSLGGNEYEAFVSDITNQQAKIEKIRLKRSSW

SEQ ID NO: 39 - DNA, 1206 bp, Streptococcus pyogenes
atgaatgaatttgaagatttgctaaacagtgttagcgaagtgaaccctggtgatgttgtcactgcggaagttttaactgttgataacggtcaagcaaacgttgttatcgaaggaacaggtgttgaaggtgtcttgacacttcgtgaattgactaacgaccgcgatgctgatattaacgactttgttaaagctggcgacacagttgaagtacttgttcttcgtcaagtagtaggtaaagatactgatacagttactttcctagtatctaaaaaacgtttggaagctcgtaaagcctgggacaaacttgttggtcgtgaaggcgaagttgttactgttaaaggtacccgtgctgttaaaggtggcctttcagttgaatttgaaggacttcgtggatttatccctgcttcaatgattgacactcgttttgttcgcaacactgaaaaatttgttggacaagagtttgatgctaaaatcaaagaagttgatgcagcagaaaaccgtttcatcctatcacgtcgtgaagttatcgaagaggccgctaaagaagctcgtgctgaagtgttctctaagatttcagaaggtgcagtcgttacaggtactgtagcgcgtttaacaagttttggtgctttcattgaccttggtggtgttgacggacttgttcacgtgactgaattgtctcacgaacgtaacgtgtcacctaaatcagttgtttcagttggtgaagaagttgaagttaaagttctttcaattgacgaagaagctggtcgtgtgtcactttcacttaaagcaacaacacctggaccatgggacggcgttgaacaaaaacttgctcaaggtgatgttgttgaaggtaaagtaaaacgcttgactgacttcggtgcttttgttgaagtattaccaggtattgatggacttgttcatatttcacaaatttcacacaaacgtgttgaaaatccaaaagatgtactttctgtaggacaagaagtaacagttaaagttcttgaagtgaatgcagctgatgagcgcgtatcattatcaatcaaagctcttgaagaacgcccagcgcaagctgaaggagacaacaaagaagaaaaacgtcaatcacgcccacgtcgtccaaaacgtgaatcaagacgtgactacgaactcccagaaacacaaactggattctcaatggctgatcttttcggtgatattgaattgtaa

SEQ ID NO: 40 - protein, 401 aa, Streptococcus pyogenes
MNEFEDLLNSVSEVNPGDVVTAEVLTVDNGQANVVIEGTGVEGVLTLRELTNDRDADINDFVKAGDTVEVLVLRQVVGKDTDTVTFLVSKKRLEARKAWDKLVGREGEVVTVKGTRAVKGGLSVEFEGLRGFIPASMIDTRFVRNTEKFVGQEFDAKIKEVDAAENRFILSRREVIEEAAKEARAEVFSKISEGAVVTGTVARLTSFGAFIDLGGVDGLVHVTELSHERNVSPKSVVSVGEEVEVKVLSIDEEAGRVSLSLKATTPGPWDGVEQKLAQGDVVEGKVKRLTDFGAFVEVLPGIDGLVHISQISHKRVENPKDVLSVGQEVTVKVLEVNAADERVSLSIKALEERPAQAEGDNKEEKRQSRPRRPKRESRRDYELPETQTGFSMADLFGDIEL

SEQ ID NO: 41 - DNA, 900 bp, Streptococcus pyogenes
atgttatactattcttatcttaataaaggagttactatgaagaaatcagttacattactgtctatcggacttgccagccttttattggcagcatgtgcgccacatcaatctcaaaaatcaagttgggacactatcaaagaaaaaggggtgttaaaagtagctaccccaggaacctatcagccaacttctttttacaacgataataatgagttagtaggttacgaagtagatatggtcaaagaaatcggtaaacgacttaacattaaagtcaagtttgttgaaacaggatttgaccaagcctttacctcagttgatagtggtcgagtggatatttctttgaacaactttgacattaccccaaaacgtcagaaaaaatacaatatctctacgccttataaatacggggtaggaggcatgattgtccgtgctgatggcagctcaaacatagctaaaaaagatcttagcgactggaaaggaaaaaaagcagccggcgcttctggaacagaatacatgaaagtagcgcaaaaacagggagctgaactggtgacctacgataatgttacaggagatgtttatctaaacgatgtggctaacggtcgaacagatttcatcccaaatgattacccagctcaaaaattatttgtggattacatgttatctcaaaatccaaatctaaatgtcaaaatgagcgatgttcagtacaacccaaccgaacaaggaattgttatgaacaaaaaagacgatagcctcaagaaaaaaatagatgctgttattaaagacatgataaaagatggtagcttgaagaaaatctctgaaacctactatgctggtcaagatctgacaaaaccttttggcaaagacaaaaaaattcccgtcattgatacgaaagacgttaactaa

SEQ ID NO: 42 - protein, 299 aa, Streptococcus pyogenes
MLYYSYLNKGVTMKKSVTLLSIGLASLLLAACAPHQSQKSSWDTIKEKGVLKVATPGTYQPTSFYNDNNELVGYEVDMVKEIGKRLNIKVKFVETGFDQAFTSVDSGRVDISLNNFDITPKRQKKYNISTPYKYGVGGMIVRADGSSNIAKKDLSDWKGKKAAGASGTEYMKVAQKQGAELVTYDNVTGDVYLNDVANGRTDFIPNDYPAQKLFVDYMLSQNPNLNVKMSDVQYNPTEQGIVMNKKDDSLKKKIDAVIKDMIKDGSLKKISETYYAGQDLTKPFGKDKKIPVIDTKDVN

SEQ ID NO: 43 - DNA, 2052 bp, Streptococcus pyogenes
ttgatctataacgattacgttaacttattaggagattttatgaaaaaatattttattttaaaaagtagtgtattgagtatcctgactagttttactctattagttacagatgttcaagcagatcaagttgatgtgcaattccttggcgtcaatgattttcacggcgctcttgataataccggaacagcttacacaccaagtggtaaaataccaaatgctgggacggctgctcaattaggtgcttatatggatgacgctgagatagacttcaagcaagcaaatcaagacggaacaagtatacgtgttcaagctggagatatggtcggagccagtcctgctaactctgcacttttacaagatgagcctactgtcaaagtctttaacaaaatgaaatttgaatatggcactcttggtaatcatgaatttgacgaaggactagatgaatttaaccgtatcatgacaggtcaagcgcctgatcctgaatcaacaattaatgatatcaccaaacaatatgagcacgaagcttcgcatcaaaccatcgtcattgctaatgttattgataaaaaaaccaaggatatcccctatggttggaaaccttatgctataaaagacatagccattaatgacaaaatcgttaagattggcttcattggtgttgtgactacagagattccaaatctcgttttaaagcaaaactatgaacactatcaatttttagatgtagctgaaaccattgccaaatatgctaaagaactacaagaacaacatgttcatgctattgtggttttagctcatgttcctgcaacaagtaaagatggtgttgttgatcatgaaatggctacggttatggaaaaagtgaaccaaatctatcccgaacatagcattgatattatttttgcaggacataatcatcaatacactaatggaactatcggtaaaacacgtatcgttcaagccctctctcaaggaaaagcttatgcagatgtccgtggtacgctagatactgataccaatgattttattaaaactccatcagcaaatgttgttgctgtagcaccaggtatcaaaacagaaaattcagatatcaaagctataataaatcatgctaatgatattgttaaaacagttactgaacgaaaaatcggaactgcaactaattcttcaactatttctaaaacagaaaatattgataaagaatctcctgtcggtaacttagcaacaacggctcagcttactattgctaagaaaacttttccaactgttgactttgctatgaccaataatggtggtattcgaagtgacctagttgtcaaaaatgaccggaccatcacctggggagctgcacaggctgtacaaccatttggtaatatccttcaagtcattcaaatgactggtcaacacatttacgatgtcctaaatcagcaatacgatgaaaaccagacctattttcttcaaatgtcaggtttaacatacacttatacagataatgatcctaagaactctgatacccccttcaagatagttaaggtttataaagacaatggtgaagaaattaacttaacaactacttacaccgttgttgtcaacgactttctttatggtggtggtgatggcttttcagcatttaaaaaagctaaattaatcggagctattaacacagatactgaagctttcatcacatatatcacaaatttagaagcatcaggtaaaactgttaatgctactataaaaggggttaaaaattatgtaacttcaaaccttgaaagttcgacaaaagttaatagtgctggtaaacacagtatcattagtaaggtttttagaaatcgtgatggcaatacagtgtctagtgaagtcatttcagaccttttgacttctactgaaaacactaataacagccttggcaaaaaagaaacaacaacaaacaaaaatactatctctagttccactcttccaataacaggggacaattataaaatgtctcctattatgacaatccttgccttgataagcttaggtggactaaacgcttttattaaaaaaaggaaatcctag

SEQ ID NO: 44 - protein, 683 aa, Streptococcus pyogenes
MIYNDYVNLLGDFMKKYFILKSSVLSILTSFTLLVTDVQADQVDVQFLGVNDFHGALDNTGTAYTPSGKIPNAGTAAQLGAYMDDAEIDFKQANQDGTSIRVQAGDMVGASPANSALLQDEPTVKVFNKMKFEYGTLGNHEFDEGLDEFNRIMTGQAPDPESTINDITKQYEHEASHQTIVIANVIDKKTKDIPYGWKPYAIKDIAINDKIVKIGFIGVVTTEIPNLVLKQNYEHYQFLDVAETIAKYAKELQEQHVHAIVVLAHVPATSKDGVVDHEMATVMEKVNQIYPEHSIDIIFAGHNHQYTNGTIGKTRIVQALSQGKAYADVRGTLDTDTNDFIKTPSANVVAVAPGIKTENSDIKAIINHANDIVKTVTERKIGTATNSSTISKTENIDKESPVGNLATTAQLTIAKKTFPTVDFAMTNNGGIRSDLVVKNDRTITWGAAQAVQPFGNILQVIQMTGQHIYDVLNQQYDENQTYFLQMSGLTYTYTDNDPKNSDTPFKIVKVYKDNGEEINLTTTYTVVVNDFLYGGGDGFSAFKKAKLIGAINTDTEAFITYITNLEASGKTVNATIKGVKNYVTSNLESSTKVNSAGKHSIISKVFRNRDGNTVSSEVISDLLTSTENTNNSLGKKETTTNKNTISSSTLPITGDNYKMSPIMTILALISLGGLNAFIKKRKS

SEQ ID NO: 45 - DNA, 3027 bp, Streptococcus pyogenes
atgaagaaacatcttaaaacagttgccttgaccctcactacagtatcggtagtcacccacaatcaggaagtttttagtttagtcaaagagccaattcttaaacaaactcaagcttcttcatcgatttctggcgctgactacgcagaaagtagcggtaaaagcaagttaaagattaatgaaacttctggccctgttgatgatacagtcactgacttattttcggataaacgtactactcctgaaaaaataaaagataatcttgctaaaggtccgagagaacaagagttaaaggcagtaacagagaatacagaatcagaaaagcagatcacttctggatctcaactagaacaatcaaaagagtctctttctttaaataaaacagtgccatcaacgtctaattgggagatttgtgattttattactaaggggaatacccttgttggtctttcaaaatcaggtgttgaaaagttatctcaaactgatcatctcgtattgcctagtcaagcagcagatggaactcaattgatacaagtagctagttttgcttttactccagataaaaagacggcaattgcagaatataccagtagggctggagaaaatggggaaataagccaactagatgtggatggaaaagaaattattaacgaaggtgaggtttttaattcttatctactaaagaaggtaacaatcccaactggttataaacatattggtcaagatgcttttgtggacaataagaatattgctgaggttaatcttcctgaaagcctcgagactatttctgactatgcttttgctcacctagctttgaaacagatcgatttgccagataatttaaaagcgattggagaattagctttttttgataatcaaattacaggtaaactttctttgccacgtcagttaatgcgattagcagaacgtgcttttaaatcaaaccatatcaaaacaattgagtttagaggaaatagtctaaaagtgataggggaagctagttttcaagataatgatctgagtcaactaatgctacctgacggtcttgaaaaaatagaatcagaagcttttacaggaaatccaggagatgatcactacaataaccgtgttgttttgtggacaaaatctggaaaaaatccttctggtcttgctactgaaaatacctatgttaatcctgataagtcactatggcaggaaagtcctgagattgattatactaaatggttagaggaagattttacctatcaaaaaaatagtgttacaggtttttcaaataaaggcttacaaaaagtaaaacgtaataaaaacttagaaattccaaaacagcacaatggtgttactattactgaaattggtgataatgcttttcgcaatgttgattttcaaaataaaactttacgtaaatatgatttggaagaagtaaagcttccctcaactattcggaaaataggtgcttttgcttttcaatctaataacttgaaatcttttgaagcaagtgacgatttagaagagattaaagagggagcctttatgaataatcgtattgaaaccttggaattaaaagataaattagttactattggtgatgcggctttccatattaatcatatttatgccattgttcttccagaatctgtacaagaaatagggcgttcagcatttcggcaaaatggtgcaaataatcttatttttatgggaagtaaggttaagaccttaggtgagatggcatttttatcaaatagacttgaacatctggatctttctgagcaaaaacagtttacagagattcctgttcaagccttttcagacaatgccttgaaagaagtattattaccagcatcactgaaaacgattcgagaagaagccttcaaaaagaatcatttaaaacaactggaagtggcatctgccttgtcccatattgcttttaatgctttagatgataatgatggtgatgaacaatttgataataaagtggttgttaaaacgcatcataattcctacgcactagcagatggtgagcattttatcgttgatccagataagttatcttctacaatagtagaccttgaaaagattttaaaactaatcgaaggtttagattattctacattacgtcagactactcaaactcagtttagagacatgactactgcaggtaaagcgttgttgtcaaaatctaacctccgacaaggagaaaaacaaaaattccttcaagaagcacaatttttccttggccgcgttgatttggataaagccatagctaaagctgagaaggctttagtgaccaagaaggcaacaaagaatggtcagttgcttgaaagaagtattaacaaagcggtattagcttataataatagcgctattaaaaaagctaatgttaagcgcttggaaaaagagttagacttgctaacaggattagttgagggaaaaggaccattagcgcaagctacaatggtacaaggagtttatttattaaagacgcctttgccattgccagaatattatatcggattgaacgtttattttgacaagtctggaaaattgatttatgcacttgatatgagtgatactattggcgagggacaaaaagacgcttatggtaatcctatattaaatgttgacgaggataatgaaggttatcatgccttggcagttgccactttagctgattatgaggggctcgacatcaaaacaattttaaatagtaagcttagtcaattaacatctattcgtcaggtaccgactgcagcctatcatagagccggtattttccaagctatccaaaatgcagcggcagaagcagagcagttattgcctaaaccaggtacgcactctgagaagtcaagctcaagtgaatctgctaactctaaagatagaggattgcaatcaaacccaaaaacgaatagaggacgacactctgcaatattgcctaggacagggtcaaaaggcagctttgtctatggaatcttaggttacactagcgttgctttactgtcactaataactgctataaaaaagaaaaaatattaa

SEQ ID NO: 46 - protein, 1008 aa, Streptococcus pyogenes
MKKHLKTVALTLTTVSVVTHNQEVFSLVKEPILKQTQASSSISGADYAESSGKSKLKINETSGPVDDTVTDLFSDKRTTPEKIKDNLAKGPREQELKAVTENTESEKQITSGSQLEQSKESLSLNKTVPSTSNWEICDFITKGNTLVGLSKSGVEKLSQTDHLVLPSQAADGTQLIQVASFAFTPDKKTAIAEYTSRAGENGEISQLDVDGKEIINEGEVFNSYLLKKVTIPTGYKHIGQDAFVDNKNIAEVNLPESLETISDYAFAHLALKQIDLPDNLKAIGELAFFDNQITGKLSLPRQLMRLAERAFKSNHIKTIEFRGNSLKVIGEASFQDNDLSQLMLPDGLEKIESEAFTGNPGDDHYNNRVVLWTKSGKNPSGLATENTYVNPDKSLWQESPEIDYTKWLEEDFTYQKNSVTGFSNKGLQKVKRNKNLEIPKQHNGVTITEIGDNAFRNVDFQNKTLRKYDLEEVKLPSTIRKIGAFAFQSNNLKSFEASDDLEEIKEGAFMNNRIETLELKDKLVTIGDAAFHINHIYAIVLPESVQEIGRSAFRQNGANNLIFMGSKVKTLGEMAFLSNRLEHLDLSEQKQFTEIPVQAFSDNALKEVLLPASLKTIREEAFKKNHLKQLEVASALSHIAFNALDDNDGDEQFDNKVVVKTHHNSYALADGEHFIVDPDKLSSTIVDLEKILKLIEGLDYSTLRQTTQTQFRDMTTAGKALLSKSNLRQGEKQKFLQEAQFFLGRVDLDKAIAKAEKALVTKKATKNGQLLERSINKAVLAYNNSAIKKANVKRLEKELDLLTGLVEGKGPLAQATMVQGVYLLKTPLPLPEYYIGLNVYFDKSGKLIYALDMSDTIGEGQKDAYGNPILNVDEDNEGYHALAVATLADYEGLDIKTILNSKLSQLTSIRQVPTAAYHRAGIFQAIQNAAAEAEQLLPKPGTHSEKSSSSESANSKDRGLQSNPKTNRGRHSAILPRTGSKGSFVYGILGYTSVALLSLITAIKKKKY

SEQ ID NO: 47 - DNA, 1272 bp, Streptococcus pyogenes
atgtctaaaagaggaaaaattaaaataacaacgaaaacaaagcttattacagctagtgttataacgctagtattaattataactggaatagtcttgtggaaacaacaacgaaatacgctaacagctgatatcgctaaagaaccttactctactgttagtgtaactgaagggagtattgcttcttcgactttactatcaggtactgtaaaggctttatcagaggaatatatttattttgatgctaataaaggaaatgatgcaactgttacagttaaagtaggtgatcaggtaacgcagggccagcaattagttcaatataatacaacaacagctcagtcagcttatgatactgctgttaggagtcttaacaagattggccgacaaattaatcatcttaaaacatacggagttcctgctgttagtacagaaactaatagagatgaagctaccggtgaagagacgacaacaacagttcaaccatcagctcagcaaaatgctaattataaacagcagctgcaagatttaaatgatgcttatgcagatgcacaagcagaagtaaataaagcgcagatagcgttaaatgatacagtagttatcagtagtgtctctggaactgttgtggaagtaaataatgatattgatccttcttcaaagaacagtcaaacacttgttcacgtagcaaccgaaggacagcttcaggtgaaaggaacattgacagagtatgatttagcaaacgttaaggttggtcaatctgtaaaaattaagtctaaagtttattctaatcaagaatggactggaaaaatatcatatgtttcaaactatccaactgagtctaatgcaggttcaacaacgccagcaggtagcactggagcgggaagttctacaggagctacctatgattacaagattgatattataagtcctctcaaccagcttaaacaaggcttcactgtttctgttgaggttgttaatgaagcaaaacaggccttagttcctttaacggctgttattaagaaagataaaaaacactatgtttggacttatgatgatgctactggcaaagccaaaaaagtagaggtgacacttggaaacgcagatgcacaacaacaagaaattcataaaggagtagctgttggtgacattgttattgccaatccagataaaaatatcaaaccggataaaaaactagaaggggttatttcaataggtaccaacacaaaaccggaaaaagattctcaatcaaagaataaaaaatcaggggtggataaatag

SEQ ID NO: 48 - protein, 423 aa, Streptococcus pyogenes
MSKRGKIKITTKTKLITASVITLVLIITGIVLWKQQRNTLTADIAKEPYSTVSVTEGSIASSTLLSGTVKALSEEYIYFDANKGNDATVTVKVGDQVTQGQQLVQYNTTTAQSAYDTAVRSLNKIGRQINHLKTYGVPAVSTETNRDEATGEETTTTVQPSAQQNANYKQQLQDLNDAYADAQAEVNKAQIALNDTVVISSVSGTVVEVNNDIDPSSKNSQTLVHVATEGQLQVKGTLTEYDLANVKVGQSVKIKSKVYSNQEWTGKISYVSNYPTESNAGSTTPAGSTGAGSSTGATYDYKIDIISPLNQLKQGFTVSVEVVNEAKQALVPLTAVIKKDKKHYVWTYDDATGKAKKVEVTLGNADAQQQEIHKGVAVGDIVIANPDKNIKPDKKLEGVISIGTNTKPEKDSQSKNKKSGVDK

SEQ ID NO: 49 - DNA, 294 bp, Streptococcus pyogenes
atgttaaaaatgaatcttgctaacttgcaacttttcgcccacaaaaaaggtggaggttctacatcaaacggacgtgactcacaagctaaacgccttggtgctaaagctgctgacggtcaaactgtttcaggtggatcaatcctttaccgtcaacgtggaactcatatctacccaggtgtaaacgtaggccgtggtggagatgacacactttttgctaaagttgaaggtgttgtacgtttcgaacgtaaaggacgcgataaaaaacaagtttctgtttacccagtagctaaataa

SEQ ID NO: 50 - protein, 97 aa, Streptococcus pyogenes
MLKMNLANLQLFAHKKGGGSTSNGRDSQAKRLGAKAADGQTVSGGSILYRQRGTHIYPGVNVGRGGDDTLFAKVEGVVRFERKGRDKKQVSVYPVAK

SEQ ID NO: 51 - DNA, 315 bp, Streptococcus pyogenes
atgagcacatacgcaatcatcaaaactggtggaaaacaagttaaagttgaagtaggtcaagcaatctacgttgagaaaattgacgctgaagctggcgcagaagtcacttttaacgaagttgttcttgtaggtggtgacaaaactgtagttggtactccagttgttgaaggagctactgtcgttggaactgttgaaaaacaaggaaaacaaaagaaagttgtaactttcaaatacaaacctaaaaaaggtagccaccgtaaacaaggtcatcgtcaaccttacactaaagttgtcatcaacgcaatcaacgcttaa

SEQ ID NO: 52 - protein, 104 aa, Streptococcus pyogenes
MSTYAIIKTGGKQVKVEVGQAIYVEKIDAEAGAEVTFNEVVLVGGDKTVVGTPVVEGATVVGTVEKQGKQKKVVTFKYKPKKGSHRKQGHRQPYTKVVINAINA

SEQ ID NO: 53 - DNA, 1293 bp, Streptococcus pyogenes
atgatactattgaaaagcctctataagggcttttttgctgcaatgaaggaggaaaattttgaggcaagatgttataatagagaaaaaggagggtgtgtcttgattaaaactatgcaatacaaaaaaacgatggcaacagttgttgctcttatcgtcgcacttttgctatttggcttgatttatgatttacttggggttcaaaaaaatgagctagcagctcaaaaatctgctcagccaaaggtcaaaacagcgcgtgttgtagctaatggcgacattttaattcatgatattctctacatgagtgctagaaaagctgacgatacctatgatttcactccttattttgaatatgttaaggactggattagcggtgctgacttagctattggagattatgaagggaccattagcccagattatcccttagcaggctatcccttattcaatgctccagaagagattgcaggtgctctgaaaaatactggctatgatgtagtcgatttagcccataatcatatcttagattcccaattagacggtgcccttaacactaaaaaggtttttcatcaattaggtatagacagtattggcatctatgacaaggatcgttcaaaagaatccttcttaattaaaaatgtcaatggtatcaaaattgcaattttaggttattcttatggttataacggcatggaggccacacttagccaagaagactatgagaaacacatgtctgatttagatgaagctaagataaaaaaagaacttcagctagctgaaaaaaaggctgacgtgaccattgttatgccacaaatgggaacagaatatgccttagaaccgacagcagaacaaaaagaactttaccacaaaatgattgattggggagctgacgtcgtcctaggaggccatccgcatgttattgaaccttcagagacagttataaaaggtaggcaaaagaaattcattatttactctatgggaaattttatttcaaatcagcggcttgaaaccgtagatgatatctggactgagcgtggcctattgatggaccttacttttgagaaaaaagataacaaaacaaaaattaaaacagttgaggcccatccaaccatggttttagccaaaggtaaaggcattgtgggtaaagaaggttttgaactatacaattatcgaacaatggttttagaagattttatcaaaggtggaaaataccacgacaagattgatgaggaaaccaaagcaaaagtagcacttgcctatcaggaaattaatgatttagttaacctgaaatggtaa

SEQ ID NO: 54 - protein, 430 aa, Streptococcus pyogenes
MILLKSLYKGFFAAMKEENFEARCYNREKGGCVLIKTMQYKKTMATVVALIVALLLFGLIYDLLGVQKNELAAQKSAQPKVKTARVVANGDILIHDILYMSARKADDTYDFTPYFEYVKDWISGADLAIGDYEGTISPDYPLAGYPLFNAPEEIAGALKNTGYDVVDLAHNHILDSQLDGALNTKKVFHQLGIDSIGIYDKDRSKESFLIKNVNGIKIAILGYSYGYNGMEATLSQEDYEKHMSDLDEAKIKKELQLAEKKADVTIVMPQMGTEYALEPTAEQKELYHKMIDWGADVVLGGHPHVIEPSETVIKGRQKKFIIYSMGNFISNQRLETVDDIWTERGLLMDLTFEKKDNKTKIKTVEAHPTMVLAKGKGIVGKEGFELYNYRTMVLEDFIKGGKYHDKIDEETKAKVALAYQEINDLVNLKW

SEQ ID NO: 55 - DNA, 2217 bp, Streptococcus pyogenes
ttggagatgacatctttaggaaaaaacgataaggaagttgctactgtgaagaaatttaaaacacttatcacaggttttatcaacacaagattgggttttataattactctactcttttgttactggataaagaccctgtgggcatatcatacagacttttcactagatttgggaaatatataccaagtctttctaactattatcaatccaatcccactagcttttttacttttgggggttgctctttacgttaagaatacccgagccttttatatctgttcttgggtggtttatattatccttaacattctcttgatatcaaattctatatattaccgagaattttcagactttattacagtgagtgccatgctagctagtagtaaagtctccgctggattaggggactctgctttaaaccttttacgcatctgggatattatctatattcttgattttattattctaattagtttatctatcgctaaaaaaatcaaaaatgatcaacgtccttttaacaagcgcgcagcatttgccatcaccgctttatctagtctattgctttctattaatctttttttagcagaaattgatcgtccggaactattaacacgtggcttttcaaatacttatattgtgagagctttaggactaccagcgtttaccctctatagcggcaatcaaacctatcaagctcaaaaagaacgaaatggagctactgcagaagaattaattgatgttaaaacttatgtcaaaggacattatgcagcacctgatcctcagtattttggaattggaaaaggcaaaaatattattgttcttcatttagaaagctttcaacaattcttaatagattataaactaaaagaaggagataaagaatatgaggtaacgccttttatcaactcactttatcactcaaatgctaccttagcattccctaacttttttcatcaggttaaagcaggtaaaacttctgatgctgaaaccatgatggagaattccttatttggtttaaatagtggttcttttatggtgaactacggtggtgaaaatacacaatttgctactccaagtattttagcccaaaaaggtggctataccagcgctgtctttcatggtaacgttggaactttctggaatcgcaataatgcttataaacaatggggctataattatttttttgattctagctacttctctaaacaaaatagtaagaactcttttcaatatgggttaaatgataagtacatgtttaaggattccataaaatatcttgaacagatgcaacaacctttttataccaagtttatcactgtgagtaatcactatccttatactagtctaaaaggcgaaagtagtgaagaaggttttcctttagccaaaacagacgatgaaacgatcaatggttactttgctactgccaattatttagacgctgcccttaaatctttttttgattacttgaaagccactggtttgtacgacaattctatttttgttttatatggtgatcattatggtatttcaaattctcgtaattctagtcttgctccacttcttggtaaagattctgaaacttggtctgaatatgataatgctatgctacaacgagtcccgtatatgatccatattccaggttatacgaatggtagtatcaaagaaacctttggcggtgaaatcgatgctcttcctactttactccacatacttggtattgacactagtcagtttgttcaattaggacaagatttattatcacctcaaaatagccagattgtggcacaacgaacatctgggacttatatgactcctgaatacactaactatagtggacgtctgtacaacacgcaaacaggtttagaaatcactaatcccgatgaaatgactatagccaaaactaaggaaattcgctctgctgttgctcaacaactagcagctagcgacgctattcaaacgggtgatctcctgcgctttgatactcaaaatggtctaaaagctattgatcctaaccagtttatctacactaagcagttaaaacaactgaaagatatttcagcaaaactcggatcagagtcaacaagtttatacagtaaaaatggtcataaatcaactcagaaactttttaaagcaccatcttacttagaactaaatcccgtagaagctgacgcggcaacttctgaactaaaagaggataaccccaaaaataaagaataa

SEQ ID NO: 56 - protein, 738 aa, Streptococcus pyogenes
MEMTSLGKNDKEVATVKKFKTLITGFINTRLGFIITLLFCYWIKTLWAYHTDFSLDLGNIYQVFLTIINPIPLAFLLLGVALYVKNTRAFYICSWVVYIILNILLISNSIYYREFSDFITVSAMLASSKVSAGLGDSALNLLRIWDIIYILDFIILISLSIAKKIKNDQRPFNKRAAFAITALSSLLLSINLFLAEIDRPELLTRGFSNTYIVRALGLPAFTLYSGNQTYQAQKERNGATAEELIDVKTYVKGHYAAPDPQYFGIGKGKNIIVLHLESFQQFLIDYKLKEGDKEYEVTPFINSLYHSNATLAFPNFFHQVKAGKTSDAETMMENSLFGLNSGSFMVNYGGENTQFATPSILAQKGGYTSAVFHGNVGTFWNRNNAYKQWGYNYFFDSSYFSKQNSKNSFQYGLNDKYMFKDSIKYLEQMQQPFYTKFITVSNHYPYTSLKGESSEEGFPLAKTDDETINGYFATANYLDAALKSFFDYLKATGLYDNSIFVLYGDHYGISNSRNSSLAPLLGKDSETWSEYDNAMLQRVPYMIHIPGYTNGSIKETFGGEIDALPTLLHILGIDTSQFVQLGQDLLSPQNSQIVAQRTSGTYMTPEYTNYSGRLYNTQTGLEITNPDEMTIAKTKEIRSAVAQQLAASDAIQTGDLLRFDTQNGLKAIDPNQFIYTKQLKQLKDISAKLGSESTSLYSKNGHKSTQKLFKAPSYLELNPVEADAATSELKEDNPKNKE

SEQ ID NO: 57 - DNA, 813 bp, Streptococcus pyogenes
atgaattttaaaaaaataagatttggttttttgctttgcctcctactttatcctttagcagcttgtaacaagtctgaacaacttaatcactacgaaagaattaaaaaaacaagaaaattagtcgttgctgtaagccctgattatgctccttttgaatttaaagctttagttaatggaaaagatactattgttggagcagatgttcaattagctcaggctattgctgatgaattagacgttgatcttgagctttcaccaatgagttttgataatgttttgtctagtttacagactggtaaagctgatcttgctatttcaggaatctcacatactaaagaaagagctaaagtatatgatttttcaattccttactatcaggcagaaaacgctatagtgatgagagcatctgatgctaaagtgaccaaaaatattagtgacctaaacggtaagaaagtagccgctcaaaaaggtagtatcgaggaaggtttagttaaaatacaattaccaaaggccaatctgatttctttgactgctatgggagaagccattaatgaactaaaagcaggacaagtctatgcagttaccttagaagcacctgtagctgctggttttttagcccaacataaggatctggctttagcaccctttagcttaaaaaccagtgatggagatgccaaagcagtggcccttcctaaaaatagtggagacttaaccaaagccgttaataaggttattgctaagttagatgagcaagaacggtacaagtcatttattgcagagacaatagcactaacgaaaaatactatgaagtaa

SEQ ID NO: 58 - protein, 270 aa, Streptococcus pyogenes
MNFKKIRFGFLLCLLLYPLAACNKSEQLNHYERIKKTRKLVVAVSPDYAPFEFKALVNGKDTIVGADVQLAQAIADELDVDLELSPMSFDNVLSSLQTGKADLAISGISHTKERAKVYDFSIPYYQAENAIVMRASDAKVTKNISDLNGKKVAAQKGSIEEGLVKIQLPKANLISLTAMGEAINELKAGQVYAVTLEAPVAAGFLAQHKDLALAPFSLKTSDGDAKAVALPKNSGDLTKAVNKVIAKLDEQERYKSFIAETIALTKNTMK

SEQ ID NO: 59 - DNA, 2733 bp, Streptococcus pyogenes
atgattaacaagaaatgtataatacctgtttcattgttgacactagctattacgcttactagtgttgaagaagttacttcacgccaaaatttgacttatgccaatgaaatcgtaacacaaaggccaaagagagaatctgttattagtgataaatcgaattttcccgtcatatcaccttacctagcaagtgtggattttggtgagagaaaaacacctttgccaacacctgataaaggagtaaaagtaactactgaacagtctattgctcaagtaagaaaggggcctgaagaaagaccctatactgttactggcaagattacgagtgtgatcaatggctggggaggctatggcttttatattcaagatagtgaaggtattggactttatgtttatcctcaaaaagatttaggatacagtaagggagatattgttcaattaacaggtacacttactcgctttaaaggtgatttacaactccaacaggtgactgcacacaaaaagttagagttatcttttccgacttctgttaaagaagcagtaatatcagaattagaaacaacaacaccctcaacattagttaagttatctcacgtgacagttggagaattatcaactgatcaatataacaacacatctttccttgtaagggatgatagtggtaaaagtatagttgttcatatagatcatcgtacaggggttaaaggggctgatgttgttactaaaataagtcagggtgatttgattaacctcacagccatattgtctattgttgatggtcaattacaattaagaccgttttctcttgaacaattggaagtggttaaaaaggtcacaagctcaaatagtgatgcttcatctcgtaatattgtgaaaataggcgagattcaaggagctagtcatacgtcgccacttctcaaaaaagcggtcaccgtagaacaggttgttgtcacttatttagacgattccactcatttttatgttcaagatcttaatggtgatggtgatttagcgacttcagatggtattcgtgtttttgctaaaaacgctaaggttcaagtcggcgatgttttgaccatttcaggtgaagtggaagaattctttggtcgtggttatgaggaacgtaagcagactgaccttaccatcacccaaattgtggctaaagcagtgaccaaaacagggacagctcaagttccatcaccgcttgttttagggaaagatcgtatcgcgccagccaatattattgataatgatggcttgcgtgtgtttgatccagaagaagacgctattgattattgggaatcaatggaaggcatgttagtggcggttgatgatgctaaaatccttggtccaatgaaaaataaagaaatttatgtcttacctggctctagtacaagaccgttaaataattcaggtggagtattacttccagctaattcttataacacagatgtgattcctgttcttttcaaaaaaggcaaacaaattattaaagcaggagactcttacaaaggaagattagctgggccagtatcttatagctatggtaattacaaggtctttgttgatgacagcaaaaacatgccaagtttaatggatggtcatctaaaacctgaaaaaacaaacttgcaaaaagaccttagcaagttaagcattgcttcttacaatattgaaaacttctcagccaatccttcttcaactaaagatgagaaggtcaaacggattgccgaatcctttattcatgatctgaatgctccagacattattggattaattgaagtccaagataataatgggccgactgatgatgggacaacggatgcgacacaaagcgcgcaacgcctcattgatgctattaaaaaactaggtggcccaacttatcgttatgttgatattgctccagaaaataatgttgacggaggtcaaccaggtggtaatattcgaacaggattcctttatcaaccagagcgcgtcagcctttctgataagccaaaaggcggtgctcgtgatgctctaacttgggttaatggagaattaaaccttagtgttggtcgaattgatccaactaacgccgcttggaaagatgttcgtaaatcactagcagcagaatttatcttccaaggtcgtaaagtcgttgttgttgcaaatcatttgaactctaagcgtggggataatgctctttatggttgtgtgcaaccagtcacttttaaatctgagcaaagacgtcacgtcttggctaatatgctagcacaatttgcgaaagaaggggcaaaacaccaagctaatattgtgatgctaggtgactttaatgattttgaattcacaaagacgattcaattaatcgaagaaggtgacatggttaacttggtgagccgacatgatatttcagatcggtattcttattttcaccaaggcaataatcagacccttgataatatattagtttcacgccatttacttgatcactacgaatttgacatggttcatgtgaattccccatttatggaagctcacggacgcgcatcagatcatgatccattgttacttcaattatcattttccaaagaaaatgataaggcagagtcttctaaacaaagtgtaaaagctaaaaaaacttcaaaaggaaaactgttgccaaaaacaggagatagtcttgtttatgtgataacgctactaggaacggctagtttattagtgcctattttattattgactaaaggcaaaaaggaatcatag

SEQ ID NO: 60 - protein, 910 aa, Streptococcus pyogenes
MINKKCIIPVSLLTLAITLTSVEEVTSRQNLTYANEIVTQRPKRESVISDKSNFPVISPYLASVDFGERKTPLPTPDKGVKVTTEQSIAQVRKGPEERPYTVTGKITSVINGWGGYGFYIQDSEGIGLYVYPQKDLGYSKGDIVQLTGTLTRFKGDLQLQQVTAHKKLELSFPTSVKEAVISELETTTPSTLVKLSHVTVGELSTDQYNNTSFLVRDDSGKSIVVHIDHRTGVKGADVVTKISQGDLINLTAILSIVDGQLQLRPFSLEQLEVVKKVTSSNSDASSRNIVKIGEIQGASHTSPLLKKAVTVEQVVVTYLDDSTHFYVQDLNGDGDLATSDGIRVFAKNAKVQVGDVLTISGEVEEFFGRGYEERKQTDLTITQIVAKAVTKTGTAQVPSPLVLGKDRIAPANIIDNDGLRVFDPEEDAIDYWESMEGMLVAVDDAKILGPMKNKEIYVLPGSSTRPLNNSGGVLLPANSYNTDVIPVLFKKGKQIIKAGDSYKGRLAGPVSYSYGNYKVFVDDSKNMPSLMDGHLKPEKTNLQKDLSKLSIASYNIENFSANPSSTKDEKVKRIAESFIHDLNAPDIIGLIEVQDNNGPTDDGTTDATQSAQRLIDAIKKLGGPTYRYVDIAPENNVDGGQPGGNIRTGFLYQPERVSLSDKPKGGARDALTWVNGELNLSVGRIDPTNAAWKDVRKSLAAEFIFQGRKVVVVANHLNSKRGDNALYGCVQPVTFKSEQRRHVLANMLAQFAKEGAKHQANIVMLGDFNDFEFTKTIQLIEEGDMVNLVSRHDISDRYSYFHQGNNQTLDNILVSRHLLDHYEFDMVHVNSPFMEAHGRASDHDPLLLQLSFSKENDKAESSKQSVKAKKTSKGKLLPKTGDSLVYVITLLGTASLLVPILLLTKGKKES

SEQ ID NO: 61 - DNA, 6180 bp, Streptococcus pyogenes
atgtttttaaaacaccaagatgtgaaacaaaaaaattggagaatgcgtaaggtcaaaaaagtctttgttagttcatgtatgcttttaacagtgggcctcggagttgccgtacctactggattcagccaatctaatggcgtgatggttgtaaaggctgcggaagtgccggcgacagatttatcacgtcaggcgtctgattcggagagggtagatgaatcgtctttattgcagaaagaaaacttatcagtagattcatttaaattagaaaatttaaatggatgggaagctgaaaatgatacagcaggtaatttggggaaatttaaagatccagatagttcgggctatcaaaatattttgacatcatctggaaagaatatcagtgtagctgttgctcccaaaggttcaggtaaaatgaacattaaagtaactaaaagatcaaattttcagggtggatattatgtaggtggtcttagaactcaaactccggtattgaagttaaatgatgtttatcgatattcttttacaactaaaaaattatcaggaaattcttcagagttcaaaacgagagttaagcccgttgaatctaataataaactagggaaagagcttgttattagggtggataataaaaatgtatctactaagcatgattggcttccagacatctctgatggaactcatactgtggacttcactggtcttgataaaaaattatctgttgctttcagattttctccaagacaaacttcgaatgttgtttacgaattttctaacataaatataaaaaacattagtcctgcatcagtgccggctattccttcgaaagttttagagggaaccagcgtcttgtcgggtactgcaatatcttctggagatacattagaaaaaagaaaatcgtttgatggcgatatcctaagagtttataaagatagcaaaatcattgctagaacagtaataaaaggcaataagtgggatgttaaactttcaaagcctcttattgcaggtgaaaaattagattttgagattttgcatccgagatctcaaaacgttagtaaaaaaatttcaaaacaagtcgaagctaaaccatttgatccagcttcctataaagaaaaagttatagccaaattaaagccggtttatgaagctactagtgaaaaaatcacaaatgatgcttggttggatgaaaatgcgaaggatttgcaaaaacaaaaattagaagaacaatatatttctggaaaagtagcgatatcagaggctggaactaaacaagaagctatagatgcagcatataataaatattcaagtcaaacagatccagactctcttcctagtcagtataaacaaggtaataaagaaaatgaacaagaaaaagggcgtcaagatttaatccagactcgtgatctgacgttgaaagccattcaagaagacaaatggctaacagagcaggagaaaacaattcaaaaagaagaagcattaaaagcttttgaaactggtatagaaagtgttaatcaaacagtatcattagaacagttgaagcaacggttaatagtgtataaagcttctgaaaaagattcagagaaaaaagaatatcctgagtcaattcctaatcagcatattccagggaaagaaaaagaagttaaagctgctaaacaagaagaacttaaaaaattacatgacacaactcttgaaaaaatcaatcaagataaatggttgacgccagaccaacaagctgaacagttaaaacaagcggaagttacttttaaaaaaggccaagaagcaattaaaagtgctcagactttaactcagcttgagacagacttagctgattatgtttctgagaatgaaggtaagggaaattctattcccgataaatacaaatctggcaataaagatgatttggtaaataaggctgaagttaaacttaaggaagctcacgaagctactaaacaagcaattgaaaaagatccatggttgagtccggaacagaaaaaagctcaaaaagaaaaagccaaagcaagactagatgagggcttgaaagctcttaaagctgcagatagtttagagattcttaaagtgacagaagaagctttcgttgataaagaaaaaaatccagattcaattccaaatcaacataaagctggaactgctgatcaagctagaaaacaagctttagatagtttagataaggaggttcaaaaagagttagagtcaattgataacgataatactctaacaactgatgagaaagcagctgctaagaaaaaagtcaatgacgcttatgatgtagctaagcaaacagctatggaagccaattcttatgaagatttgactactattaaagatgagttcttatctaatttacctcataaacaaggaacgccgcttaaagatcaacaatctgatgctattgcagaattagagaagaagcagcaagaaattgaaaaagctattgagggtgataaaacattaccaagagacgaaaaagagaaacaaattgctgactctaaggaacgcttaaaatctgacacgcaaaaagttaaagatgctaaaaatgctgatgctattaaaaaagcatttgaagaagggaaagtgaatattcctcaagcacatatcccaggtgatttgaacaaggataaagaaaaacttcttgcagaattgaagcaaaaagcagatgatactgaaaaagctattgatgttgataaaactctgacagaagatgagaaaaaagagcaaaaagtcaaaacaaaagctgaacttgaaaaagctaaaactgatgttaaaaatactcagacacgtgaagaactagataaaaaagttccagaacttaagaaagctattgaagacactcacgttaaaggtaatcttgaaggtgttaagaataaggctattgaagatcttaaaaaagctcatactgaaacagttgctaaaataaatggtgatgatacccttgacaaagctactaaagaagctcaagtgaaagaagctgacaaagctttggcagcaggtaaagatgcgatcactaaagcagatgatgctgataaagtaagtacagctgttacagagcacacaccaaaaattaaagcagcacataaaactggtgaccttaaaaaagctcaagtagatgctaacacagctcttgacaaagcagctgaaaaagaacgtggagaaatcaataaagatgctacactaacgacagaagataaagcaaaacaactgaaagaagttgagacagctcttactaaagctaaagataacgtgaaagctgctaagacagcagacgctatcaatgacgcacgtgataaaggcgtagcaacaattgatgccgtccataaagcaggtcaagacttaggtgctcgtaagtcaggtcaagtcgctaaacttgaagaagcagctaaagcaacgaaagacaagatttcagctgatccaactttgacaagcaaagaaaaagaagagcaatctaaagctgttgacgctgaacttaagaaagcgatagaagctgttaacgcagctgacacagctgacaaggttgacgatgctcttggtgaaggtgttacagacatcaagaaccaacacaagtcaggtgactctatcgacgctcgtcgtgaggctcatggtaaggaacttgatagagtcgctcaagaaactaaaggtgcgattgaaaaagaccctactttgacgactgaagaaaaagctaaacaagttaaagacgtagatgccgctaaagaaagaggcatggctaagcttaatgaagctaaagatgctgatgctttagacaaagcttacggtgaaggtgttacagacatcaagaaccaacacaagtcaggtgaccctgtcgacgctcgtcgtggattacacaacaagtcaatcgacgaagtggcgcaagcaactaaggacgctatcacagcagatacgactttgactgaagctgaaaaagaaacacaacgtggcaatgttgataaagaagcaactaaagctaaagaagaacttgctaaggctaaagatgctgatgctttagacaaagcgtacggtgacggtgtaaccagcatcaagaaccaacacaagtcaggtaaaggtcttgacgttcgtaaagatgagcacaagaaagctcttgaagctgttgctaaacgtgtcactgctgaaattgaggctgatccaaccttaacaccagaagtgagagaacaacaaaaagcagaggttcaaaaagagcttgaacttgcgactgataagattgctgaagctaaagatgcagatgaagcagacaaagcttacggtgacggtgtcacagcgatcgaaaatgcccacgttattggtaaaggtatcgaagctcgtaaagaccttgctaagaaagaccttgctgaagctgctgctaagacaaaagctctcattattgaagacaaaacgcttactgatgatcaacgtaaagaacagttattaggtgttgatacagagtatgctaaaggtatcgagaatattgatgcagctaaggatgctgcaggtgttgataaagcatatagtgacggtgttcgtgacatcctggcacagtacaaagaaggtcaaaaccttaatgatcgtcgtaatgctgccaaagaatttcttcttaaagaagcagacaaagtgacgaaactaatcaatgatgatccaaccttgactcatgaccaaaaagttgatcaaatcaacaaagttgaacaagctaagttagacgcaatcaagtctgttgatgatgctcaaacagctgatgctatcaatgatgctcttggtaagggtattgaaaacatcaacaaccaataccaacatggcgatggcgttgatgttcgtaaagcgactgccaaaggcgatcttgaaaaagaagctgctaaagtgaaagctcttattgctaaggatccgaccttaactcaagctgataaagacaaacaaacagcagcggttgacgcagctaagaatacagcaattgcagcggttgataaagcgacaacaactgaaggcattaaccaagaacttggtaaaggcatcacagctatcaataaagcttaccgtccaggtgaaggtgttaaagcacgtaaagaagccgctaaagctgatcttgaaaaagaagctgctaaagtgaaagctcttattactaacgacccaaccttaacaaaagctgataaagctaaacaaacagaagctgttgctaaagcccttaaagctgctatcgcagcggttgataaagcgacaacagctgaaggcattaaccaagaacttggtaaaggcatcacagctatcaataaagcttaccgtccaggtgaaggtgttaaagcacgtaaagaagccgctaaggctgatcttgaaagagaagctgctaaggttcgtgaagctatcgctaacgacccaaccttaacaaaagctgataaagctaaacaaacagaagctgttgctaaagctcttaaagctgctatcgcagcggttgataaagcgacaacagctgaaggcattaaccaagaacttggtaaaggcatcacagctatcaacaaagcttaccgtccaggtgaaggtgttgaagcacataaagaagctgctaaagctaatcttgaaaaagtagctaaagaaactaaagctcttatttcaggagaccgttacttgagcgaaactgaaaaagcagtccaaaaacaagctgttgagcaagctcttgcgaaagcacttggtcaagttgaggctgctaagacagttgaagctgttaagttggcagaaaaccttggtactgtagctatccgttcagcatatgttgctggtttagctaaagatactgatcaagcaacagctgctcttaacgaagcgaaacaagctgctattgaagctcttaaacaagctgcggcagaaacacttgctaagattacaactgatgctaaattgactgaagctcaaaaagctgaacaatcagaaaatgtatcattagcgcttaagacggctattgcgactgttcgttcagcacaatctattgcgtctgtgaaagaagcaaaagataaaggtattactgctatccgtgcagcctatgtgcctaataaggcagtcgcaaaatcatcgtcagcgaaccatcttccaaaatcaggtgatgcaaactcaattgttcttgttggcttaggagttatgtctcttcttttaggtatggtgctttatagcaagaaaaaagaaagtaaagactaa

SEQ ID NO: 62 - protein, 2059 aa, Streptococcus pyogenes
MFLKHQDVKQKNWRMRKVKKVFVSSCMLLTVGLGVAVPTGFSQSNGVMVVKAAEVPATDLSRQASDSERVDESSLLQKENLSVDSFKLENLNGWEAENDTAGNLGKFKDPDSSGYQNILTSSGKNISVAVAPKGSGKMNIKVTKRSNFQGGYYVGGLRTQTPVLKLNDVYRYSFTTKKLSGNSSEFKTRVKPVESNNKLGKELVIRVDNKNVSTKHDWLPDISDGTHTVDFTGLDKKLSVAFRFSPRQTSNVVYEFSNINIKNISPASVPAIPSKVLEGTSVLSGTAISSGDTLEKRKSFDGDILRVYKDSKIIARTVIKGNKWDVKLSKPLIAGEKLDFEILHPRSQNVSKKISKQVEAKPFDPASYKEKVIAKLKPVYEATSEKITNDAWLDENAKDLQKQKLEEQYISGKVAISEAGTKQEAIDAAYNKYSSQTDPDSLPSQYKQGNKENEQEKGRQDLIQTRDLTLKAIQEDKWLTEQEKTIQKEEALKAFETGIESVNQTVSLEQLKQRLIVYKASEKDSEKKEYPESIPNQHIPGKEKEVKAAKQEELKKLHDTTLEKINQDKWLTPDQQAEQLKQAEVTFKKGQEAIKSAQTLTQLETDLADYVSENEGKGNSIPDKYKSGNKDDLVNKAEVKLKEAHEATKQAIEKDPWLSPEQKKAQKEKAKARLDEGLKALKAADSLEILKVTEEAFVDKEKNPDSIPNQHKAGTADQARKQALDSLDKEVQKELESIDNDNTLTTDEKAAAKKKVNDAYDVAKQTAMEANSYEDLTTIKDEFLSNLPHKQGTPLKDQQSDAIAELEKKQQEIEKAIEGDKTLPRDEKEKQIADSKERLKSDTQKVKDAKNADAIKKAFEEGKVNIPQAHIPGDLNKDKEKLLAELKQKADDTEKAIDVDKTLTEDEKKEQKVKTKAELEKAKTDVKNTQTREELDKKVPELKKAIEDTHVKGNLEGVKNKAIEDLKKAHTETVAKINGDDTLDKATKEAQVKEADKALAAGKDAITKADDADKVSTAVTEHTPKIKAAHKTGDLKKAQVDANTALDKAAEKERGEINKDATLTTEDKAKQLKEVETALTKAKDNVKAAKTADAINDARDKGVATIDAVHKAGQDLGARKSGQVAKLEEAAKATKDKISADPTLTSKEKEEQSKAVDAELKKAIEAVNAADTADKVDDALGEGVTDIKNQHKSGDSIDARREAHGKELDRVAQETKGAIEKDPTLTTEEKAKQVKDVDAAKERGMAKLNEAKDADALDKAYGEGVTDIKNQHKSGDPVDARRGLHNKSIDEVAQATKDAITADTTLTEAEKETQRGNVDKEATKAKEELAKAKDADALDKAYGDGVTSIKNQHKSGKGLDVRKDEHKKALEAVAKRVTAEIEADPTLTPEVREQQKAEVQKELELATDKIAEAKDADEADKAYGDGVTAIENAHVIGKGIEARKDLAKKDLAEAAAKTKALIIEDKTLTDDQRKEQLLGVDTEYAKGIENIDAAKDAAGVDKAYSDGVRDILAQYKEGQNLNDRRNAAKEFLLKEADKVTKLINDDPTLTHDQKVDQINKVEQAKLDAIKSVDDAQTADAINDALGKGIENINNQYQHGDGVDVRKATAKGDLEKEAAKVKALIAKDPTLTQADKDKQTAAVDAAKNTAIAAVDKATTTEGINQELGKGITAINKAYRPGEGVKARKEAAKADLEKEAAKVKALITNDPTLTKADKAKQTEAVAKALKAAIAAVDKATTAEGINQELGKGITAINKAYRPGEGVKARKEAAKADLEREAAKVREAIANDPTLTKADKAKQTEAVAKALKAAIAAVDKATTAEGINQELGKGITAINKAYRPGEGVEAHKEAAKANLEKVAKETKALISGDRYLSETEKAVQKQAVEQALAKALGQVEAAKTVEAVKLAENLGTVAIRSAYVAGLAKDTDQATAALNEAKQAAIEALKQAAAETLAKITTDAKLTEAQKAEQSENVSLALKTAIATVRSAQSIASVKEAKDKGITAIRAAYVPNKAVAKSSSANHLPKSGDANSIVLVGLGVMSLLLGMVLYSKKKESKD

SEQ ID NO: 63 - DNA, 1548 bp, Streptococcus pyogenes
atgaaaaagaaaattcttttaatgatgagtttaatcagtgtcttttttgcttggcaacttactcaggcaaaacaagtcttagcagagggtaaagtgaaggtggtgacaactttctatcctgtttatgaatttacaaaaggggttattggtaatgatggcgatgttttcatgcttatgaaagcaggaacggaccctcatgattttgagccttctacaaaagccattaaaaaaatccaagatgcagatgcatttgtttatatggatgacaatatggaaacttgggtttctgatgtgaaaaaatcattgacatctaaaaaagtgaccatcgtcaagggaactggtaacatgctcttggtagcaggagctggacatgaccatccccatgaggatgctgacaaaaagcatgagcataataaacatagcgaagaaggacacaaccatgcttttgacccacacgtgtggttgtcaccataccgtagcattacagtcgttgaaaatattcgcgacagtctttcaaaagcttacccagaaaaagcagagaacttcaaagccaatgccgctacttatattgaaaaattaaaagagcttgacaaagactatacggcagcactttcagatgctaagcaaaagagctttgtgacacaacacgcagcttttggttatatggcacttgactatggcttgaaccaaatttctattaatggtgtcacaccagatgcagaaccatcagcaaaacgtattgctactttgtcaaaatacgttaaaaaatatggcatcaaatacatttattttgaggaaaatgcgtcaagtaaagtcgcaaaaaccctagctaaagaagcaggagttaaagcggctgtgcttagtccgcttgaaggtttgactgaaaaagagatgaaagctggccaagattactttacggtcatgcgtaaaaaccttgaaaccttacgcttaaccactgatgtggctggtaaagaaattcttccagaaaaagacacgactaagacagtttacaatggttatttcaaagacaaagaagtcaaagatcgtcaattatctgactggtcaggtagctggcaatctgtttacccctatctacaagatggtactttagaccaagtttgggactacaaggctaaaaaatctaaaggtaaaatgacagcagccgagtacaaagattactacactactggttataaaactgacgtggaacaaatcaaaatcaatggtaagaaaaagaccatgacctttgttcgtaatggtgaaaagaaaaccttcacttacacatacgccggcaaagaaatcttgacctatccaaaaggaaatcgcggggttcgtttcatgtttgaagctaaagaagcagatgctggcgaattcaaatacgttcaattcagtgaccatgccattgctcctgaaaaagcaaagcatttccacctgtactggggtggtgacagccaagaaaaattacataaagagttagaacattggccaacttactacggttcagacttatctggtcgtgaaatcgcccaagaaatcaatgctcattaa

SEQ ID NO: 64 - protein, 515 aa, Streptococcus pyogenes
MKKKILLMMSLISVFFAWQLTQAKQVLAEGKVKVVTTFYPVYEFTKGVIGNDGDVFMLMKAGTDPHDFEPSTKAIKKIQDADAFVYMDDNMETWVSDVKKSLTSKKVTIVKGTGNMLLVAGAGHDHPHEDADKKHEHNKHSEEGHNHAFDPHVWLSPYRSITVVENIRDSLSKAYPEKAENFKANAATYIEKLKELDKDYTAALSDAKQKSFVTQHAAFGYMALDYGLNQISINGVTPDAEPSAKRIATLSKYVKKYGIKYIYFEENASSKVAKTLAKEAGVKAAVLSPLEGLTEKEMKAGQDYFTVMRKNLETLRLTTDVAGKEILPEKDTTKTVYNGYFKDKEVKDRQLSDWSGSWQSVYPYLQDGTLDQVWDYKAKKSKGKMTAAEYKDYYTTGYKTDVEQIKINGKKKTMTFVRNGEKKTFTYTYAGKEILTYPKGNRGVRFMFEAKEADAGEFKYVQFSDHAIAPEKAKHFHLYWGGDSQEKLHKELEHWPTYYGSDLSGREIAQEINAH

SEQ ID NO: 65 - DNA, 1248 bp, Streptococcus pyogenes
atggcctaccgtctatctataaaatatattttattggaggcttttcctaaaatggcaaaagaaaaatacgatcgtagtaaaccccacgttaacattggtacaatcggacacgttgaccatggtaaaactactttaacagctgcaatcacaactgtattggcacgtcgcttgccttcatcagttaaccaaccaaaagattacgcttctatcgatgctgctccagaagaacgcgaacgcggaatcactatcaacactgcacacgttgagtacgaaactgcaactcgtcactatgcgcacatcgacgctccaggacacgcggactacgttaaaaacatgatcactggtgccgctcaaatggacggagctatccttgtagttgcttcaactgatggaccaatgccacaaactcgtgagcacatccttctttcacgtcaggttggtgttaaacaccttatcgtgttcatgaacaaagttgaccttgttgatgacgaagagttgcttgaattagttgagatggaaattcgtgaccttctttcagaatacgatttcccaggtgatgaccttccagttatccaaggttcagctcttaaagctcttgaaggcgacactaaatttgaagacatcatcatggaattgatggatactgttgattcatacattccagaaccagaacgcgacactgacaaaccattgcttcttccagtcgaagacgtattctcaattacaggtcgtggtacagttgcttcaggacgtatcgaccgtggtactgttcgtgtcaacgacgaaatcgaaatcgttggtatcaaagaagaaactaaaaaagctgttgttactggtgttgaaatgttccgtaaacaacttgacgaaggtcttgcaggagacaacgtaggtatccttcttcgtggtgttcaacgtgacgaaatcgaacgtggtcaagttattgctaaaccaagttcaatcaacccacacactaaattcaaaggtgaagtatatatcctttctaaagacgaaggtggacgtcacactccattcttcaacaactaccgtccacaattctacttccgtacaactgacgtaacaggttcaatcgaacttccagcaggtacagaaatggttatgcctggtgataacgtgacaatcaacgttgagttgatccacccaatcgccgtagaacaaggtactactttctcaatccgtgaaggtggacgtactgttggttcaggtatcgtttcagaaatcgaagcttaa

SEQ ID NO: 66 - protein, 415 aa, Streptococcus pyogenes
MAYRLSIKYILLEAFPKMAKEKYDRSKPHVNIGTIGHVDHGKTTLTAAITTVLARRLPSSVNQPKDYASIDAAPEERERGITINTAHVEYETATRHYAHIDAPGHADYVKNMITGAAQMDGAILVVASTDGPMPQTREHILLSRQVGVKHLIVFMNKVDLVDDEELLELVEMEIRDLLSEYDFPGDDLPVIQGSALKALEGDTKFEDIIMELMDTVDSYIPEPERDTDKPLLLPVEDVFSITGRGTVASGRIDRGTVRVNDEIEIVGIKEETKKAVVTGVEMFRKQLDEGLAGDNVGILLRGVQRDEIERGQVIAKPSSINPHTKFKGEVYILSKDEGGRHTPFFNNYRPQFYFRTTDVTGSIELPAGTEMVMPGDNVTINVELIHPIAVEQGTTFSIREGGRTVGSGIVSEIEA

SEQ ID NO: 67 - DNA, 387 bp, Streptococcus pyogenes
gtgaacaaaagatttaaaacaggatttctagcgcttgttgctatgctacttgttgcttgctcgcaaggaacaaaacaaatacagacgactccaagcgttccaaaagcagaccatcacgttcgcttagttgtcaaagaagataccaatactgttgacgaaaaagtttcttttggaaaaggagatacggtgcttgaggttctcaaagataattatgaggttaaagaaaaagatggttttatcacagcaattgatggtatcgagcaagacacgaaagctaacaaatactggctttttaaggtgaatggaaagatggcagataagggtgccgatcaaattaccgttaaagatggtgatagcattgaattttatcaagaagtttttaattag

SEQ ID NO: 68 - protein, 128 aa, Streptococcus pyogenes
MNKRFKTGFLALVAMLLVACSQGTKQIQTTPSVPKADHHVRLVVKEDTNTVDEKVSFGKGDTVLEVLKDNYEVKEKDGFITAIDGIEQDTKANKYWLFKVNGKMADKGADQITVKDGDSIEFYQEVFN

SEQ ID NO: 69 - DNA, 1158 bp, Streptococcus pyogenes
atgaaaattacagttgtaggcattggatacgttggattatcgatagggctcctacttgcaaaggaacacgacgtcaccttttttgatattgataataaaaaaattgatttaataaataaaaggcaatcccctcttaaagaagcagctataaacaaacttttatgtaaggcaaaaaatattaatgcaacttcttctgaagaattagcatataaggatgcgactttcataatcttgtctttgccaaccaacctaaaatttaataagcttgatacttccattatcgaaatttctgtaagtaatattttaaagataaacaaaaaggctacaattgtaataaagtcgacagttccaattggttttacagaatatttaaggaatcgatttcactacaacgatatcattttttcacctgagttccttagggaaggatcaactattcatgatcaattgtatccttcgagaactatagttggaaatgaatctagaaattctcaattattcttagacatactaacagatatatcggttgaaaaagactcgccatctttattagttggctcttctgaagcagaagcgataaagttattttcgaatgcatacttggcacaaaaaattgctttttttaatgagttggatacgtttgctgaaatgcaaaatttggactcaaaaaaaattattgaggctatgggatatgaccagagaataggaaattcgcacaataatccttctttcggttttggtgggtactgtcttcctaaggatattaagcaattagagtatcattttaaagaaattccagcaccaattattaccagtataagtgaatctaatttattaagaaaaattcatatagcaaaaatgattttgaacagctcagctaaaacaataggaatttatagaattaattccaaaaaagattcggataattgtagggaatcttctacaattgatgttgctaaacttctaaaaagcagtggtaaggatgttatcatctttgagcccttaattaaccaaaaaaagtttttggggtgccctttaagtaatgattttaatgaatttattaaatattcggatattatagttgccaatagaatagatgatgctctgagaaaatgtaattcaaaagtttttacacgtgatatttttcagtatgattaa

SEQ ID NO: 70 - protein, 385 aa, Streptococcus pyogenes
MKITVVGIGYVGLSIGLLLAKEHDVTFFDIDNKKIDLINKRQSPLKEAAINKLLCKAKNINATSSEELAYKDATFIILSLPTNLKFNKLDTSIIEISVSNILKINKKATIVIKSTVPIGFTEYLRNRFHYNDIIFSPEFLREGSTIHDQLYPSRTIVGNESRNSQLFLDILTDISVEKDSPSLLVGSSEAEAIKLFSNAYLAQKIAFFNELDTFAEMQNLDSKKIIEAMGYDQRIGNSHNNPSFGFGGYCLPKDIKQLEYHFKEIPAPIITSISESNLLRKIHIAKMILNSSAKTIGIYRINSKKDSDNCRESSTIDVAKLLKSSGKDVIIFEPLINQKKFLGCPLSNDFNEFIKYSDIIVANRIDDALRKCNSKVFTRDIFQYD

SEQ ID NO: 71 - DNA, 1170 bp, Streptococcus pyogenes
atgattattactaaaaagagcttatttgtgacaagtgtcgctttgtcgttagtacctttggcgacagcgcaggcacaagagtggacaccacgatcggttacagaaatcaagtctgaactcgtcctagttgataatgtttttacttatactgtaaaatacggtgacactttaagcacaattgctgaagcaatggggattgatgtgcatgtcttaggagatattaatcatattgctaatattgacctaatttttccagacacgatcctaacagcaaactacaatcaacacggtcaggcaacgaatttgacggttcaagcacctgcttctagtccagctagcgttagtcatgtacctagcagtgagccattaccccaagcatctgccacctctcaaccgactgttcctatggcaccacctgcgacaccatctgatgtcccaacgacaccattcgcatctgcaaagccagatagttctgtgacagcgtcatctgagctcacatcgtcaacgaatgatgtttcgactgagttgtctagcgaatcacaaaagcagccagaagtaccacaagaagcagttccaactcctaaagcagctgaaacgactgaagtcgaacctaagacagacatctcagaagccccaacttcagctaataggcctgtacctaacgagagtgcttcagaagaagtttcttctgcggccccagcacaagccccagcagaaaaagaagaaacctctgcgccagcagcacaaaaagctgtagctgacaccacaagtgttgcaacctcaaatggcctttcttacgctccaaaccatgcctacaatccaatgaatgcagggcttcaaccacaaacagcagccttcaaagaagaagtggcttctgcctttggtattacgtcatttagtggttaccgtccaggtgatccaggagatcatggtaaaggtttggccattgattttatggtgcctgaaaattctgctcttggtgatcaagttgctcaatatgccattgaccatatggcagagcgtggtatttcatacgttatttggaaacagcgattctatgcgccatttgcaagtatttacggaccagcctacacatggaaccccatgccagatcgcggcagtattacagaaaaccattatgatcatgttcatgtctcctttaatgcttaa

SEQ ID NO: 72 - protein, 389 aa, Streptococcus pyogenes
MIITKKSLFVTSVALSLVPLATAQAQEWTPRSVTEIKSELVLVDNVFTYTVKYGDTLSTIAEAMGIDVHVLGDINHIANIDLIFPDTILTANYNQHGQATNLTVQAPASSPASVSHVPSSEPLPQASATSQPTVPMAPPATPSDVPTTPFASAKPDSSVTASSELTSSTNDVSTELSSESQKQPEVPQEAVPTPKAAETTEVEPKTDISEAPTSANRPVPNESASEEVSSAAPAQAPAEKEETSAPAAQKAVADTTSVATSNGLSYAPNHAYNPMNAGLQPQTAAFKEEVASAFGITSFSGYRPGDPGDHGKGLAIDFMVPENSALGDQVAQYAIDHMAERGISYVIWKQRFYAPFASIYGPAYTWNPMPDRGSITENHYDHVHVSFNA

SEQ ID NO: 73 - DNA, 690 bp, Streptococcus pyogenes
atggctaaaaaaagcaaacaaatgcgtgctgcacttgaaaaagtagatagcacaaaagcgtacagtgtagaagaagctgtagcattagtaaaagaaacgaacttcgcaaaatttgatgcgtctgttgaagttgcttacaacttgaacattgacgttcgtaaagcagaccaacaaatccgtggcgcaatggtattgccaaacggaactggtaaaacacaacgtgttcttgtttttgcacgtggtgcaaaagctgaagaagcaaaagcagctggtgcagacttcgtaggtgaagacgaccttgttgcaaaaatcaatggtggatggcttgactttgacgttgttatcgcaacgccagacatgatggctatcgtaggtcgtcttggacgtgtccttggacctcgtaacttgatgccaaaccctaaaactggtacagtaacgatggatgttgctaaagccgttgaagagtctaaaggtggtaaaatcacttaccgtgctgacaaagcaggtaatgttcaagctcttattggtaaagtttcatttgatgctgacaaattggttgaaaacttcaaagccttccacgatgtaatggctaaagctaaacctgcaacagctaaaggaacttacatggcaaacgtctcaatcacatcaacacaaggtgttggtatcaaggttgatcctaactcactttaa

SEQ ID NO: 74 - protein, 228 aa, Streptococcus pyogenes
MAKKSKQMRAALEKVDSTKAYSVEEAVALVKETNFAKFDASVEVAYNLNIDVRKADQQIRGAMVLPNGTGKTQRVLVFARGAKAEEAKAAGADFVGEDDLVAKINGGWLDFDVVIATPDMMAIVGRLGRVLGPRNLMPNPKTGTVTMDVAKAVEESKGGKITYRADKAGNVQALIGKVSFDADKLVENFKAFHDVMAKAKPATAKGTYMANVSITSTQGVGIKVDPNS

SEQ ID NO: 75 - DNA, 498 bp, Streptococcus pyogenes
atgcaatattgcatatctgtgggaggtaaaaatctcaattaccgccaaaaccacaacaggaggatttttaaaatggctaaaaaagtcgaaaaacttgtaaaacttcaaatccctgctggtaaagctacaccagctccaccagttggaccagctcttggtcaagcaggtatcaacatcatgggcttcactaaagaatttaacgctcgtacagctgatcaagctggtatgatcatcccagttgttatctcagtttatgaagacaaatcatttgatttcatcactaaaacaccaccagctgctgttcttttgaaaaaagctgcaggtgttgaaaaaggatcaggtacacctaacactactaaggttgcgacagttactcgtgcacaagtacaagaaattgctgaaactaagatgccagatttgaacgctgcaaacattgaagctgcaatgcgtatgatcgaaggtactgctcgttctatgggattcactgttactgactag

SEQ ID NO: 76 - protein, 165 aa, Streptococcus pyogenes
MQYCISVGGKNLNYRQNHNRRIFKMAKKVEKLVKLQIPAGKATPAPPVGPALGQAGINIMGFTKEFNARTADQAGMIIPVVISVYEDKSFDFITKTPPAAVLLKKAAGVEKGSGTPNTTKVATVTRAQVQEIAETKMPDLNAANIEAAMRMIEGTARSMGFTVTD

SEQ ID NO: 77 - DNA, 807 bp, Streptococcus pyogenes
atgaaaaaattattatctctcagtttagtagccattagtttacttaatttgagtgcttgtgaatctgttgaccgcgctataaaaggcgataaatacattgatgaaaaaactgccaaagaagaaagcgaagcagcttctaaagcctatgaagaaagcattcaaaaagctctcaaagctgatgctagccaatttccacaactaaccaaagaagtcggcaaagaagaagctaaggtcgtaatgaggacaagtcaaggggacattacccttaagttattcccaaaatatgctcccttagctgttgagaacttcctcacccatgctaaaaaaggctactatgataaccttaccttccatcgtgtgatcaacgactttatgattcaatcaggtgaccccaaaggagatggcacaggtggtgaatcgatttggaaaggcaaggatcctaaaaaagatgctggcaatggctttgtcaacgaaatctctccatttttatatcatattcgcggtgctcttgccatggcaaatgctggtgctaatactaacggtagccaattttatatcaaccaaaacaagaaaaatcaaagcaagggattatcaagtaccaactacccaaaacctatcatctctgcctatgagcatggcggcaatccaagcttagatggcggttatactgtatttggtcaagtcattgatggtatggatgttgtcgataaaattgccgctacttctatcaaccaaaatgataaaccagaacaagacattacgattacctcaattgacattgtcaaagattatcgctttaaaaactaa

SEQ ID NO: 78 - protein, 268 aa, Streptococcus pyogenes
MKKLLSLSLVAISLLNLSACESVDRAIKGDKYIDEKTAKEESEAASKAYEESIQKALKADASQFPQLTKEVGKEEAKVVMRTSQGDITLKLFPKYAPLAVENFLTHAKKGYYDNLTFHRVINDFMIQSGDPKGDGTGGESIWKGKDPKKDAGNGFVNEISPFLYHIRGALAMANAGANTNGSQFYINQNKKNQSKGLSSTNYPKPIISAYEHGGNPSLDGGYTVFGQVIDGMDVVDKIAATSINQNDKPEQDITITSIDIVKDYRFKN

SEQ ID NO: 79 - DNA, 4944 bp, Streptococcus pyogenes
gtggagaaaaagcaacgtttttcccttagaaaatacaaatcaggaacgttttcggtcttaataggaagcgttttcttggtgatgacaacaacagtagcagcagatgagctaagcacaatgagcgaaccaacaatcacgaatcacgctcaacaacaagcgcaacatctcaccaatacagagttgagctcagctgaatcaaaatctcaagacacatcacaaatcactctcaagacaaatcgtgaaaaagagcaatcacaagatctagtctctgagccaaccacaactgagctagctgacacagatgcagcatcaatggctaatacaggttctgatgcgactcaaaaaagcgcttctttaccgccagtcaatacagatgttcacgattgggtaaaaaccaaaggagcttgggacaagggatacaaaggacaaggcaaggttgtcgcagttattgacacagggatcgatccggcccatcaaagcatgcgcatcagtgatgtatcaactgctaaagtaaaatcaaaagaagacatgctagcacgccaaaaagccgccggtattaattatgggagttggataaatgataaagttgtttttgcacataattatgtggaaaatagcgataatatcaaagaaaatcaattcgaggattttgatgaggactgggaaaactttgagtttgatgcagaggcagagccaaaagccatcaaaaaacacaagatctatcgtccccaatcaacccaggcaccgaaagaaactgttatcaaaacagaagaaacagatggttcacatgatattgactggacacaaacagacgatgacaccaaatacgagtcacacggtatgcatgtgacaggtattgtagccggtaatagcaaagaagccgctgctactggagaacgctttttaggaattgcaccagaggcccaagtcatgttcatgcgtgtttttgccaacgacatcatgggatcagctgaatcactctttatcaaagctatcgaagatgccgtggctttaggagcagatgtgatcaacctgagtcttggaaccgctaatggggcacagcttagtggcagcaagcctctaatggaagcaattgaaaaagctaaaaaagccggtgtatcagttgttgtagcagcaggaaatgagcgcgtctatggatctgaccatgatgatccattggcgacaaatccagactatggtttggtcggttctccctcaacaggtcgaacaccaacatcagtggcagctataaacagtaagtgggtgattcaacgtctaatgacggtcaaagaattagaaaaccgtgccgatttaaaccatggtaaagccatctattcagagtctgtcgactttaaagacataaaagatagcctaggttatgataaatcgcatcaatttgcttatgtcaaagagtcaactgatgcgggttataacgcacaagacgttaaaggtaaaattgctttaattgaacgtgatcccaataaaacctatgacgaaatgattgctttggctaagaaacatggagctctgggagtacttatttttaataacaagcctggtcaatcaaaccgctcaatgcgtctaacagctaatgggatggggataccatctgctttcatatcgcacgaatttggtaaggccatgtcccaattaaatggcaatggtacaggaagtttagagtttgacagtgtggtctcaaaagcaccgagtcaaaaaggcaatgaaatgaatcatttttcaaattggggcctaacttctgatggctatttaaaacctgacattactgcaccaggtggcgatatctattctacctataacgataaccactatggtagccaaacaggaacaagtatggcctctcctcagattgctggcgccagccttttggtcaaacaatacctagaaaagactcagccaaacttgccaaaagaaaaaattgctgatatcgttaagaacctattgatgagcaatgctcaaattcatgttaatccagagacaaaaacgaccacctcaccgcgtcagcaaggggcaggattacttaatattgacggagctgtcactagcggcctttatgtgacaggaaaagacaactatggcagtatatcattaggcaacatcacagatacgatgacgtttgatgtgactgttcacaacctaagcaataaagacaaaacattacgttatgacacagaattgctaacagatcatgtagacccacaaaagggccgcttcactttgacttctcactccttaaaaacgtaccaaggaggagaagttacagtcccagccaatggaaaagtgactgtaagggttaccatggatgtctcacagttcacaaaagagctaacaaaacagatgccaaatggttactatctagaaggttttgtccgctttagagatagtcaagatgaccaactaaatagagtaaacattccttttgttggttttaaagggcaatttgaaaacttagcagttgcagaagagtccatttacagattaaaatctcaaggcaaaactggtttttactttgatgaatcaggtccaaaagacgatatctatgtcggtaaacactttacaggacttgtcactcttggttcagagaccaatgtgtcaaccaaaacgatttctgacaatggtctacacacacttggcacctttaaaaatgcagatggcaaatttatcttagaaaaaaatgcccaaggaaaccctgtcttagccatttctccaaatggtgacaacaaccaagattttgcagccttcaaaggtgttttcttgagaaaatatcaaggcttaaaagcaagtgtctaccatgctagtgacaaggaacacaaaaatccactgtgggtcagcccagaaagctttaaaggagataaaaactttaatagtgacattagatttgcaaaatcaacgaccctgttaggcacagcattttctggaaaatcgttaacaggagctgaattaccagatgggcattatcattatgtggtgtcttattacccagatgtggtcggtgccaaacgtcaagaaatgacatttgacatgattttagaccgacaaaaaccggtactatcacaagcaacatttgatcctgaaacaaaccgattcaaaccagaacccctaaaagaccgtggattagctggtgttcgcaaagacagtgtcttttatctagaaagaaaagacaacaagccttatacagttacgataaacgatagctacaaatatgtctcagtagaagacaataaaacatttgtggagcgacaagctgatggcagctttatcttgccgcttgataaagcaaaattaggggatttctattacatggtcgaggattttgcagggaacgtggccatcgctaagttaggagatcacttaccacaaacattaggtaaaacaccaattaaacttaagcttacagacggtaattatcagaccaaagaaacgcttaaagataatcttgaaatgacacagtctgacacaggtctagtcacaaatcaagcccagctagcagtggtgcaccgcaatcagccgcaaagccagctaacaaagatgaatcaggatttctttatctcaccaaacgaagatgggaataaagactttgtggcctttaaaggcttgaaaaataacgtgtataatgacttaacggttaacgtatacgctaaagatgaccaccaaaaacaaacccctatctggtctagtcaagcaggcgctagtgtatccgctattgaaagtacagcctggtatggcataacagcccgaggaagcaaggtgatgccaggtgattatcagtatgttgtgacctatcgtgacgaacatggtaaagaacatcaaaagcagtacaccatatctgtgaatgacaaaaaaccaatgatcactcagggacgttttgataccattaatggcgttgaccactttactcctgacaagacaaaagcccttgactcatcaggcattgtccgcgaagaagtcttttacttggccaagaaaaatggccgtaaatttgatgtgacagaaggtaaagatggtatcacagttagtgacaataaggtgtatatccctaaaaatccagatggttcttacaccatttcaaaaagagatggtgtcacactgtcagattattactaccttgtcgaagatagagctggtaatgtgtcttttgctaccttgcgtgacctaaaagcggtcggaaaagacaaagcagtagtcaattttggattagacttaccggtccctgaagacaaacaaatagtgaactttacctaccttgtgcgggatgcagatggtaaaccgattgaaaacctagagtattataataactcaggtaacagtcttatcttgccatacggcaaatacacggtcgaattgttgacctatgacaccaatgcagccaaactagagtcagataaaatcgtttcctttaccttgtcagctgataacaacttccaacaagttacctttaagataacgatgttagcaacttctcaaataactgcccactttgatcatcttttgccagaaggcagtcgcgttagccttaaaacagctcaagatcagctaatcccgcttgaacagtccttgtatgtgcctaaagcttatggcaaaaccgttcaagaaggcacttacgaagttgttgtcagcctgcctaaaggctaccgtatcgaaggcaacacaaaggtgaataccctaccaaatgaagtgcacgaactatcattacgccttgtcaaagtaggagatgcctcagattcaactggtgatcataaggttatgtcaaaaaataattcacaggctttgacagcctctgccacaccaaccaagtcaacgacctcagcaacagcaaaagccctaccatcaacgggtgaaaaaatgggtctcaagttgcgcatagtaggtcttgtgttactcggacttacttgcgtctttagccgaaaaaaatcaaccaaagattga

SEQ ID NO: 80 - protein, 1647 aa, Streptococcus pyogenes
MEKKQRFSLRKYKSGTFSVLIGSVFLVMTTTVAADELSTMSEPTITNHAQQQAQHLTNTELSSAESKSQDTSQITLKTNREKEQSQDLVSEPTTTELADTDAASMANTGSDATQKSASLPPVNTDVHDWVKTKGAWDKGYKGQGKVVAVIDTGIDPAHQSMRISDVSTAKVKSKEDMLARQKAAGINYGSWINDKVVFAHNYVENSDNIKENQFEDFDEDWENFEFDAEAEPKAIKKHKIYRPQSTQAPKETVIKTEETDGSHDIDWTQTDDDTKYESHGMHVTGIVAGNSKEAAATGERFLGIAPEAQVMFMRVFANDIMGSAESLFIKAIEDAVALGADVINLSLGTANGAQLSGSKPLMEAIEKAKKAGVSVVVAAGNERVYGSDHDDPLATNPDYGLVGSPSTGRTPTSVAAINSKWVIQRLMTVKELENRADLNHGKAIYSESVDFKDIKDSLGYDKSHQFAYVKESTDAGYNAQDVKGKIALIERDPNKTYDEMIALAKKHGALGVLIFNNKPGQSNRSMRLTANGMGIPSAFISHEFGKAMSQLNGNGTGSLEFDSVVSKAPSQKGNEMNHFSNWGLTSDGYLKPDITAPGGDIYSTYNDNHYGSQTGTSMASPQIAGASLLVKQYLEKTQPNLPKEKIADIVKNLLMSNAQIHVNPETKTTTSPRQQGAGLLNIDGAVTSGLYVTGKDNYGSISLGNITDTMTFDVTVHNLSNKDKTLRYDTELLTDHVDPQKGRFTLTSHSLKTYQGGEVTVPANGKVTVRVTMDVSQFTKELTKQMPNGYYLEGFVRFRDSQDDQLNRVNIPFVGFKGQFENLAVAEESIYRLKSQGKTGFYFDESGPKDDIYVGKHFTGLVTLGSETNVSTKTISDNGLHTLGTFKNADGKFILEKNAQGNPVLAISPNGDNNQDFAAFKGVFLRKYQGLKASVYHASDKEHKNPLWVSPESFKGDKNFNSDIRFAKSTTLLGTAFSGKSLTGAELPDGHYHYVVSYYPDVVGAKRQEMTFDMILDRQKPVLSQATFDPETNRFKPEPLKDRGLAGVRKDSVFYLERKDNKPYTVTINDSYKYVSVEDNKTFVERQADGSFILPLDKAKLGDFYYMVEDFAGNVAIAKLGDHLPQTLGKTPIKLKLTDGNYQTKETLKDNLEMTQSDTGLVTNQAQLAVVHRNQPQSQLTKMNQDFFISPNEDGNKDFVAFKGLKNNVYNDLTVNVYAKDDHQKQTPIWSSQAGASVSAIESTAWYGITARGSKVMPGDYQYVVTYRDEHGKEHQKQYTISVNDKKPMITQGRFDTINGVDHFTPDKTKALDSSGIVREEVFYLAKKNGRKFDVTEGKDGITVSDNKVYIPKNPDGSYTISKRDGVTLSDYYYLVEDRAGNVSFATLRDLKAVGKDKAVVNFGLDLPVPEDKQIVNFTYLVRDADGKPIENLEYYNNSGNSLILPYGKYTVELLTYDTNAAKLESDKIVSFTLSADNNFQQVTFKITMLATSQITAHFDHLLPEGSRVSLKTAQDQLIPLEQSLYVPKAYGKTVQEGTYEVVVSLPKGYRIEGNTKVNTLPNEVHELSLRLVKVGDASDSTGDHKVMSKNNSQALTASATPTKSTTSATAKALPSTGEKMGLKLRIVGLVLLGLTCVFSRKKSTKD

SEQ ID NO: 81 - DNA, 846 bp, Streptococcus pyogenes
atgtcttttaaaaaatggattggaatagtcggaatcgctttagcatcaactgtattggttgcttgttctgaaaaacaagatgataaaaacactttaactattggggtgatgacaaaaacagaatctgatcaagcgagatgggataaagttgaagaattattgaaaaaagacaatatcactttgaagtacaaagaatttacagattactcgcaacctaataaggcagttgctaatggtgaagtcgatattaatgccttccaacactataatttcttaaataactggaataaggaaaataaggaacatttggtggccattgctgatacctatatcagcccaattaaccttttctctggaaccagtcaagatggaaaggctaaatacaaatcagtagctgatctgccaaatggtactcaaattgcagtaccaaatgatgcgaccaatgaaagccgtgccctctatgtgctgcaatcagctggcctcattaaattgaatgtgtctggtgatcaattagcaaccattgccaatatctcagagaacaaaaagaaattagatatcaaggaattagatgctagccaaacggcacgtgctttagtatctgctgatgcagctgttgtcaataatagttacgctgttcctgcaaaaattgactacaaaacctctcttttcaaagaaaaagcagatgacaattcaaaacagtggattaacattattgcaggtcaaaaagattgggaaaaatcagagaaggctgatgctattaaaaaactcatcaaggcctaccaaactgatgaggtgaagaaagtcgtggaaaaaacttcaaatggtatagatgtatccgtatggtaa

SEQ ID NO: 82 - protein, 281 aa, Streptococcus pyogenes
MSFKKWIGIVGIALASTVLVACSEKQDDKNTLTIGVMTKTESDQARWDKVEELLKKDNITLKYKEFTDYSQPNKAVANGEVDINAFQHYNFLNNWNKENKEHLVAIADTYISPINLFSGTSQDGKAKYKSVADLPNGTQIAVPNDATNESRALYVLQSAGLIKLNVSGDQLATIANISENKKKLDIKELDASQTARALVSADAAVVNNSYAVPAKIDYKTSLFKEKADDNSKQWINIIAGQKDWEKSEKADAIKKLIKAYQTDEVKKVVEKTSNGIDVSVW

SEQ ID NO: 83 - DNA, 402 bp, Streptococcus pyogenes
ttgcagctatttaaaggaatactaatggataatgatatgaggaataaaatgaaaaaagaagaactcttaaaaattgttgtggaagcaactgaggaaaagcgtgctaaagatattttagccttggatttagaggggttaactagtttgaccgattattttgtgattgcgagtgcaacaaacagtcgtcaattagaggctattgcggataatattcgtgaaaaggtaaaagaggctggtggagatgctagccatgttgaaggtaatagccaagcaggctgggtcttgcttgatttgaccgatgtggtggtacatctttttttagaagacgagcgttaccactataatcttgaaaaattgtggcatgaagcgcctgctgtggctctagatgcctatttagcttaa

SEQ ID NO: 84 - protein, 133 aa, Streptococcus pyogenes
MQLFKGILMDNDMRNKMKKEELLKIVVEATEEKRAKDILALDLEGLTSLTDYFVIASATNSRQLEAIADNIREKVKEAGGDASHVEGNSQAGWVLLDLTDVVVHLFLEDERYHYNLEKLWHEAPAVALDAYLA

SEQ ID NO: 85 - DNA, 1515 bp, Streptococcus pyogenes
ttgaggacaactatgaaaaaatatattttaaaccgtatcatgcgatcgttagtgtcggtagttctggtaacggctttaacatacaccatcgtatatactctagtacctaccagccttatctttaaacaagaccctaattataataaaatgacaacaacaccagataaaaaagtagcgtatgaaaatctaacttttcaacgtatgggttatgtcaattatttttcaagcaaagaattaaaagataatgcttctaaagtagatagtagtgtaacgacagaagcaactagtgctaacaaagctatctatgagaagtatattgattctcttggcaatggctggcagctaaaacgcttccccactagcaaacagttttatgcaattcgcaatattcctatttacgaacgtgtttggaactttttctcaaatctagttgttattgatcacccttggaagattcaggataaagataatccaaaattagctaggtatattcgtctagaaaaagataaatcagttggctggtcacttgttggttcggggacaaaacataagtatctcctctatactaacggaaaatttccttatcttcaccaaaactttgttaccttaaacttagggacatcttatccaacatacagcaatattcctgttcttcaggtcatttcacaagggcaaggacgaacagctcttcaagatgtgaccttcccatcaggtgtcactaagaaatcgtcagtggatatctatagccgtagctacaaaaatccaaaatcattggatgatatcaccaaggtaaactatggtaagggagattcctacactaaaaccatcaataattatgtcgacccatcaatgattcacaattcttttgtaattggtttttttggtgttatgttttcctatatcgttggtttgcctcttggtttatttatggctcggtttaaaaatacctattttgacagtttctcaacagcgaccatgaccttcatgcttgctttaccaagtattgctgttatctatgttgttcgcttcctaggtggcatggttggtttaccagatagtttcccaatgctgggggcatctgatcctaaatcttatattttaccagcccttattttaggaattttaaatattccaactacggttatctggttccgtcgctatcttgttgaccttcaggccagcgattgggtacgttttgcgcgttcaaaaggattatcagaatctgaaatttacagagggcatctcttcaaaaatgccatggtcccaattgtgtcaggggttcctgcaagtattatccttgctattggtggtgcaacattaacagagactgtctttgccttcccgggtatgggtaaaatgttaattgattctattaaatctgctaacaattctatgattgttggattaacctttatcttcactgtcttgtcaattgtttcacttttactaggagatattgtcatgacccttgtcgatccacgtattaaattgtcaacaaaaaaaggaggtaagtaa

SEQ ID NO: 86 - protein, 504 aa, Streptococcus pyogenes
MRTTMKKYILNRIMRSLVSVVLVTALTYTIVYTLVPTSLIFKQDPNYNKMTTTPDKKVAYENLTFQRMGYVNYFSSKELKDNASKVDSSVTTEATSANKAIYEKYIDSLGNGWQLKRFPTSKQFYAIRNIPIYERVWNFFSNLVVIDHPWKIQDKDNPKLARYIRLEKDKSVGWSLVGSGTKHKYLLYTNGKFPYLHQNFVTLNLGTSYPTYSNIPVLQVISQGQGRTALQDVTFPSGVTKKSSVDIYSRSYKNPKSLDDITKVNYGKGDSYTKTINNYVDPSMIHNSFVIGFFGVMFSYIVGLPLGLFMARFKNTYFDSFSTATMTFMLALPSIAVIYVVRFLGGMVGLPDSFPMLGASDPKSYILPALILGILNIPTTVIWFRRYLVDLQASDWVRFARSKGLSESEIYRGHLFKNAMVPIVSGVPASIILAIGGATLTETVFAFPGMGKMLIDSIKSANNSMIVGLTFIFTVLSIVSLLLGDIVMTLVDPRIKLSTKKGGK

SEQ ID NO: 87 - DNA, 1980 bp, Streptococcus pyogenes
gtgacttttatgaagaaaagtaaatggttggcagctgtaagtgttgcgatcttgtcagtatccgctttggcagcttgtggtaataaaaatgcttcaggtggctcagaagctacaaaaacctacaagtacgtttttgttaacgatccaaaatcattggattatattttgactaatggcggtggaacgactgatgtgataacacaaatggttgatggtcttttggaaaacgatgagtatggtaatttagtaccatcacttgctaaagattggaaggtttcaaaagacggtctgacttatacttatactcttcgcgatggtgtctcttggtatacggctgatggtgaagaatatgccccagtaacagcagaagattttgtgactggtttgaagcacgcggttgacgataaatcagatgctctttacgttgttgaagattcaataaaaaacttaaaggcttaccaaaatggtgaagtagattttaaagaagttggtgtcaaagcccttgacgataaaactgttcagtatactttgaacaagcctgaaagctactggaattcaaaaacaacttatagtgtgcttttcccagttaatgcgaaatttttgaagtcaaaaggtaaagattttggtacaaccgatccatcatcaatccttgttaatggtgcttacttcttgagcgccttcacctcaaaatcatctatggaattccataaaaatgaaaactactgggatgctaagaatgttgggatagaatctgttaaattgacttactcagatggttcagacccaggttcgttctacaagaactttgacaagggtgagttcagcgttgcacgactttacccaaatgaccctacctacaaatcagctaagaaaaactatgctgataacattacttacggaatgttgactggagatatccgtcatttaacatggaatttgaaccgtacttctttcaaaaacactaagaaagaccctgcacaacaagatgccggtaagaaagctcttaacaacaaggattttcgtcaagctattcagtttgcttttgaccgagcgtcattccaagcacaaactgcaggtcaagatgccaaaacaaaagccttacgtaacatgcttgtcccaccaacatttgtgaccattggagaaagtgattttggttcagaagttgaaaaggaaatggcaaaacttggtgatgaatggaaagacgttaacttagctgatgctcaagatggtttctataatcctgaaaaagcaaaagctgagtttgcaaaagccaaagaagctttaacagctgaaggtgtaaccttcccagttcaattagattaccctgttgaccaagcaaacgcagcaactgttcaggaagcccagtctttcaaacaatctgttgaagcatctcttggtaaagagaatgtcattgtcaatgttcttgaaacagaaacatcaactcacgaagcccaaggcttctatgctgagaccccagaacaacaagactacgatatcatttcatcatggtggggaccagactatcaagatccacggacctaccttgacatcatgagtccagtaggtggtggatctgttatccaaaaacttggaatcaaagcaggtcaaaataaggatgttgtggcagctgcaggccttgatacctaccaaactcttcttgatgaagcagcagcaattacagacgacaacgatgcgcgctataaagcttacgcaaaagcacaagcctaccttacagataatgccgtagatattccagttgtggcattgggtggcactccacgagttactaaagccgttccatttagcgggggcttctcttgggcagggtctaaaggtcctctagcatataaaggaatgaaacttcaagacaaacctgtcacagtaaaacaatacgaaaaagcaaaagaaaaatggatgaaagcaaaggctaagtcaaatgcaaaatatgctgagaagttagctgatcacgttgaaaaataa

SEQ ID NO: 88 - protein, 659 aa, Streptococcus pyogenes
MTFMKKSKWLAAVSVAILSVSALAACGNKNASGGSEATKTYKYVFVNDPKSLDYILTNGGGTTDVITQMVDGLLENDEYGNLVPSLAKDWKVSKDGLTYTYTLRDGVSWYTADGEEYAPVTAEDFVTGLKHAVDDKSDALYVVEDSIKNLKAYQNGEVDFKEVGVKALDDKTVQYTLNKPESYWNSKTTYSVLFPVNAKFLKSKGKDFGTTDPSSILVNGAYFLSAFTSKSSMEFHKNENYWDAKNVGIESVKLTYSDGSDPGSFYKNFDKGEFSVARLYPNDPTYKSAKKNYADNITYGMLTGDIRHLTWNLNRTSFKNTKKDPAQQDAGKKALNNKDFRQAIQFAFDRASFQAQTAGQDAKTKALRNMLVPPTFVTIGESDFGSEVEKEMAKLGDEWKDVNLADAQDGFYNPEKAKAEFAKAKEALTAEGVTFPVQLDYPVDQANAATVQEAQSFKQSVEASLGKENVIVNVLETETSTHEAQGFYAETPEQQDYDIISSWWGPDYQDPRTYLDIMSPVGGGSVIQKLGIKAGQNKDVVAAAGLDTYQTLLDEAAAITDDNDARYKAYAKAQAYLTDNAVDIPVVALGGTPRVTKAVPFSGGFSWAGSKGPLAYKGMKLQDKPVTVKQYEKAKEKWMKAKAKSNAKYAEKLADHVEK

SEQ ID NO: 89 - DNA, 1233 bp, Streptococcus pyogenes
atgatcaaacgattaatttccctagtggtcatcgccttattttttgcagcaagcactgttagcggtgaagagtattcggtaactgctaagcatgcgattgccgttgaccttgaaagtggcaaagttttatacgaaaaagatgctaaagaagttgtcccagtcgcctcagtcagtaagctcttgacaacctatctggtttacaaagaagtttctaagggcaagctaaattgggatagtcctgtaactatttctaactacccttatgaactcactacaaactatactattagtaacgttcctcttgataagagaaaatataccgttaaagaacttttaagtgcgttagttgttaataacgccaatagccccgctattgctttagctgaaaaaataggcggaaccgaacccaaatttgttgacaaaatgaaaaaacaattaagacaatggggcatttccgatgcaaaggtcgtcaattcaactggcttaactaaccattttttaggagctaatacttatcctaatacagaaccagatgatgaaaattgtttttgcgccactgatttagctattattgccaggcatctcttattagaatttccagaagtactgaaattatctagcaaatcctccactatttttgctggacaaaccatttacagttataattacatgcttaaaggcatgccttgttatcgagaaggcgtggatggtctttttgttggttattctaaaaaagccggtgcttcttttgtagctactagtgtcgaaaatcaaatgagggttattacagtagttttaaatgctgatcaaagccacgaggatgatttagctatatttaaaacaaccaatcaattgttgcagtaccttttaattaattttcaaaaagtccagttaattgaaaataataaaccagtaaaaacgttatatgtcttagacagtcctgaaaaaactgtcaaacttgtagcccaaaatagtttattttttatcaaaccaatacatacaaagaccaaaaataccgtccatattactaagaaatcatccacaatgatcgcacctctatcaaagggacaagtcttaggtagagcaacccttcaagataaacatcttattggacaaggttatctggatactcctccttctatcaatcttatccttcaaaaaaacatttctaaaagtttctttttaaaggtctggtggaaccgttttgtgaggtatgtcaatacctctttatag

SEQ ID NO: 90 - protein, 410 aa, Streptococcus pyogenes
MIKRLISLVVIALFFAASTVSGEEYSVTAKHAIAVDLESGKVLYEKDAKEVVPVASVSKLLTTYLVYKEVSKGKLNWDSPVTISNYPYELTTNYTISNVPLDKRKYTVKELLSALVVNNANSPAIALAEKIGGTEPKFVDKMKKQLRQWGISDAKVVNSTGLTNHFLGANTYPNTEPDDENCFCATDLAIIARHLLLEFPEVLKLSSKSSTIFAGQTIYSYNYMLKGMPCYREGVDGLFVGYSKKAGASFVATSVENQMRVITVVLNADQSHEDDLAIFKTTNQLLQYLLINFQKVQLIENNKPVKTLYVLDSPEKTVKLVAQNSLFFIKPIHTKTKNTVHITKKSSTMIAPLSKGQVLGRATLQDKHLIGQGYLDTPPSINLILQKNISKSFFLKVWWNRFVRYVNTSL

SEQ ID NO: 91 - DNA, 471 bp, Streptococcus pyogenes
atgagtcgtaaaaatcaagcgcctaaacgcgaagtattaccagatccattatataactcaaaaatcgtaacacgtcttatcaaccgtgttatgcttgacggtaaacgtggtacagctgctactatcgtttacgatgctttcaacgctatcaaagaagcaacaggaaatgacgctcttgaagtatttgaaacagctatggacaacatcatgcctgtacttgaagtacgcgcacgccgtgtcggtggttctaactaccaagtcccagttgaagttcgtccagaacgtcgtacaacacttggacttcgttggttggtaaacgcatcacgtgctcgtggtgaacacactatgaaagatcgtcttgctaaagaaatcatggatgctgcaaacaacacaggtgcatcagttaagaaacgtgaagacactcacaaaatggctgaagctaaccgtgcctttgctcacttccgttggtaa

SEQ ID NO: 92 - protein, 156 aa, Streptococcus pyogenes
MSRKNQAPKREVLPDPLYNSKIVTRLINRVMLDGKRGTAATIVYDAFNAIKEATGNDALEVFETAMDNIMPVLEVRARRVGGSNYQVPVEVRPERRTTLGLRWLVNASRARGEHTMKDRLAKEIMDAANNTGASVKKREDTHKMAEANRAFAHFRW

SEQ ID NO: 93 - DNA, 2640 bp, Streptococcus pyogenes
atggaaaaaggagagagaatggacttagaacaaacgaagccaaaccaagttaagcagaaaattgctttaacctcaacaattgctttattgagtgccagtgtaggcgtatctcaccaagtcaaagcagatgatagagcctcaggagaaacgaaggcgagtaatactcacgacgatagtttaccaaaaccagaaacaattcaagaggcaaaggcaactattgatgcagttgaaaaaactctcagtcaacaaaaagcagaactgacagagcttgctaccgctctgacaaaaactactgctgaaatcaaccacttaaaagagcagcaagataatgaacaaaaagctttaacctctgcacaagaaatttacactaatactcttgcaagtagtgaggagacgctattagcccaaggagccgaacatcaaagagagttaacagctactgaaacagagcttcataatgctcaagcagatcaacattcaaaagagactgcattgtcagaacaaaaagctagcatttcagcagaaactactcgagctcaagatttagtggaacaagtcaaaacgtctgaacaaaatattgctaagctcaatgctatgattagcaatcctgatgctatcactaaagcagctcaaacggctaatgataatacaaaagcattaagctcagaattggagaaggctaaagctgacttagaaaatcaaaaagctaaagttaaaaagcaattgactgaagagttggcagctcagaaagctgctctagcagaaaaagaggcagaacttagtcgtcttaaatcctcagctccgtctactcaagatagcattgtgggtaataataccatgaaagcaccgcaaggctatcctcttgaagaacttaaaaaattagaagctagtggttatattggatcagctagttacaataattattacaaagagcatgcagatcaaattattgccaaagctagtccaggtaatcaattaaatcaataccaagatattccagcagatcgtaatcgctttgttgatcccgataatttgacaccagaagtgcaaaatgagctagcgcagtttgcagctcacatgattaatagtgtaagaagacaattaggtctaccaccagttactgttacagcaggatcacaagaatttgcaagattacttagtaccagctataagaaaactcatggtaatacaagaccatcatttgtctacggacagccaggggtatcagggcattatggtgttgggcctcatgataaaactattattgaagactctgccggagcgtcagggctcattcgaaatgatgataacatgtacgagaatatcggtgcttttaacgatgtgcatactgtgaatggtattaaacgtggtatttatgacagtatcaagtatatgctctttacagatcatttacacggaaatacatacggccatgctattaactttttacgtgtagataaacataaccctaatgcgcctgtttaccttggattttcaaccagcaatgtaggatctttgaatgaacactttgtaatgtttccagagtctaacattgctaaccatcaacgctttaataagacccctataaaagccgttggaagtacaaaagattatgcccaaagagtaggcactgtatctgatactattgcagcgatcaaaggaaaagtaagctcattagaaaatcgtttgtcggctattcatcaagaagctgatattatggcagcccaagctaaagtaagtcaacttcaaggtaaattagcaagcacacttaagcagtcagacagcttaaatctccaagtgagacaattaaatgatactaaaggttctttgagaacagaattactagcagctaaagcaaaacaagcacaactcgaagctactcgtgatcaatcattagctaagctagcatcgttgaaagccgcactgcaccagacagaagccttagcagagcaagccgcagccagagtgacagcactggtggctaaaaaagctcatttgcaatatctaagggactttaaattgaatcctaaccgccttcaagtgatacgtgagcgcattgataatactaagcaagatttggctaaaactacctcatctttgttaaatgcacaagaagctttagcagccttacaagctaaacaaagcagtctagaagctactattgctaccacagaacaccagttgactttgcttaaaaccttagctaacgaaaaggaatatcgccacttagacgaagatatagctactgtgcctgatttgcaagtagctccacctcttacgggcgtaaaaccgctatcatatagtaagatagatactactccgcttgttcaagaaatggttaaagaaacgaaacaactattagaagcttcagcaagattagctgctgaaaatacaagtcttgtagcagaagcgcttgttggccaaacctctgaaatggtagcaagtaatgccattgtgtctaaaatcacatcttcgattactcagccctcatctaagacatcttatggctcaggatcttctacaacgagcaatctcatttctgatgttgatgaaagtactcaaagagctcttaaagcaggagtcgtcatgttggcagctgtcggcctcacaggatttaggttccgtaaggaatctaagtga

SEQ ID NO: 94 - protein, 879 aa, Streptococcus pyogenes
MEKGERMDLEQTKPNQVKQKIALTSTIALLSASVGVSHQVKADDRASGETKASNTHDDSLPKPETIQEAKATIDAVEKTLSQQKAELTELATALTKTTAEINHLKEQQDNEQKALTSAQEIYTNTLASSEETLLAQGAEHQRELTATETELHNAQADQHSKETALSEQKASISAETTRAQDLVEQVKTSEQNIAKLNAMISNPDAITKAAQTANDNTKALSSELEKAKADLENQKAKVKKQLTEELAAQKAALAEKEAELSRLKSSAPSTQDSIVGNNTMKAPQGYPLEELKKLEASGYIGSASYNNYYKEHADQIIAKASPGNQLNQYQDIPADRNRFVDPDNLTPEVQNELAQFAAHMINSVRRQLGLPPVTVTAGSQEFARLLSTSYKKTHGNTRPSFVYGQPGVSGHYGVGPHDKTIIEDSAGASGLIRNDDNMYENIGAFNDVHTVNGIKRGIYDSIKYMLFTDHLHGNTYGHAINFLRVDKHNPNAPVYLGFSTSNVGSLNEHFVMFPESNIANHQRFNKTPIKAVGSTKDYAQRVGTVSDTIAAIKGKVSSLENRLSAIHQEADIMAAQAKVSQLQGKLASTLKQSDSLNLQVRQLNDTKGSLRTELLAAKAKQAQLEATRDQSLAKLASLKAALHQTEALAEQAAARVTALVAKKAHLQYLRDFKLNPNRLQVIRERIDNTKQDLAKTTSSLLNAQEALAALQAKQSSLEATIATTEHQLTLLKTLANEKEYRHLDEDIATVPDLQVAPPLTGVKPLSYSKIDTTPLVQEMVKETKQLLEASARLAAENTSLVAEALVGQTSEMVASNAIVSKITSSITQPSSKTSYGSGSSTTSNLISDVDESTQRALKAGVVMLAAVGLTGFRFRKESK

SEQ ID NO: 95 - DNA, 1320 bp, Streptococcus pyogenes
atgaacatgaagaagttagcttcattagcgatgcttggtgcatctgttttaggactagcagcttgtggcggaaagagccagaaagaggctggtgcaagtaaatctgatactgctaagacagaaatcacatggtgggctttcccggtcttcacgcaagaaaaagctgaagatggtgtgggaacctatgagaagaaattgattgctgcctttgagaaagctaatccagaaatcaaggtaaaattggaaaccattgattttacatctggtcctgagaaaatcacaactgctattgaagctggaacagctcctgatgtcctctttgatgctccaggtcgtatcattcaatatggtaaaaatgggaaattggctgacttgaatgacttgttcacagaagagtttaccaaagatgttaacaatgacaaattgattcaagcctcaaaagcaggagatacagcttacatgtatcctatcagctctgctccattctacatggcgttgaataaaaaaatgctcaaagatgctggcgtccttgatcttgtgaaagagggttggacaacagatgattttgaaaaagtcttgaaagcattgaaggacaaaggatataacccaggttctttctttgctaatggtcaaggtggtgaccaaggaccacgtgccttctttgctaacctttatagtagtcatattaccgatgacaaagtaaccaaatacaccacagatgatgctaactctattaaagccatgaccaagatttccaattggattaaagatggtttaatgatgaatggctctcagtacgatggttcagctgatattcaaaactttgcgaatggccaaacttcctttaccattctttgggcgcctgcacaaccaggcatccaagctaaattgttagaagctagtaaagtggattaccttgaaatcccattcccatcagatgatggcaaaccagaactagaatacctcgtaaatggttttgcggtctttaataacaaagatgaacaaaaagtcgctgcctctaagacatttatccaatttatcgctgatgataaagaatggggacctaaaaatgttgttcgtacaggtgctttccctgtaagaacttcttatggggatctttacaaagacaaacgaatggaaaaaattgctgaatggacaaaattctactcaccatactataacacgattgatgggtttgctgaaatgagaactctttggttcccaatggttcaagccgtctctaatggtgatgaaaagccagaagatgctttgaaagccttcactgaaaaagcaaacaagacaatcaaaaaaacacaataa

SEQ ID NO: 96 - protein, 439 aa, Streptococcus pyogenes
MNMKKLASLAMLGASVLGLAACGGKSQKEAGASKSDTAKTEITWWAFPVFTQEKAEDGVGTYEKKLIAAFEKANPEIKVKLETIDFTSGPEKITTAIEAGTAPDVLFDAPGRIIQYGKNGKLADLNDLFTEEFTKDVNNDKLIQASKAGDTAYMYPISSAPFYMALNKKMLKDAGVLDLVKEGWTTDDFEKVLKALKDKGYNPGSFFANGQGGDQGPRAFFANLYSSHITDDKVTKYTTDDANSIKAMTKISNWIKDGLMMNGSQYDGSADIQNFANGQTSFTILWAPAQPGIQAKLLEASKVDYLEIPFPSDDGKPELEYLVNGFAVFNNKDEQKVAASKTFIQFIADDKEWGPKNVVRTGAFPVRTSYGDLYKDKRMEKIAEWTKFYSPYYNTIDGFAEMRTLWFPMVQAVSNGDEKPEDALKAFTEKANKTIKKTQ

SEQ ID NO: 97 - DNA, 1788 bp, Streptococcus pyogenes
gtgatgaaaacagcacgttttttctggttttattttaaacgctatcgtttctcatttactgtcattgctgttgccgttatcttagcaacttatttacaagtaaaagctcctgtcttcttaggagagtccttgactgagttgggaaaaatcggtcaggcttattacgttgctaagatgagtggccagacacattttagccctgatttatcagcttttaatgccgtgatgtttaagcttttgatgacttatttctttactgttttagctaatctaatatatagtttcttacttacacgtgttgtctcacattcgactaaccgcatgcgcaagggcttatttggtaaattagaacgtttaaccgtcgccttttttgaccgccataaagatggggagattctttctcgtttcacgagtgatttggataatattcaaaactcgctgaaccaatccttgattcaagtggtgactaatattgccctttacatcggcctggtctggatgatgtttaggcaagatagccgtttagctttgttaaccatcgcatcaaccccagttgctctcatttttttagtgattaacatccgtttggcaagaaaatacaccaatatccaacagcaagaagtcagtgctttaaatgcttttatggatgaaaccatttcaggacaaaaggctattattgtacaaggtgtccaagaagatacgatgacagcctttttaaagcataatgaaagggttcgacaagccaccttcaaacgccgtctgttctcaggacaattatttccagtcatgaatggaatgagccttattaacacggctatcgtgatttttgtcggttcaacaattgtcctcagtgacaaatctatgccagcagcggcagcgcttggtttagtggttacttttgtacaatattcccagcaatattaccaacccatgatgcaaatcgcgtctagttggggagaattgcagctggcctttaccggtgctcaccgtattcaagaaatgtttgatgaaaccgaagaagttcgtccacaaaatgcaccagcgttcaccagcttaaaagaagcagtggcgattaaccacgtcgattttgggtatcttcctgggcaaaaagttttatcagatgtgtcaatcgttgcacccaagggcaaaatgattgccgtggttggaccgacaggttctggaaagaccactattatgaacttgattaaccgtttctacgatgtggatgcaggttcgattacctttgatggccgtgatattcgtgactacgatttggatagtcttcgtcaaaaggtagggattgtgttgcaagagtcagttcttttttcaggaaccattacggataatattcgttttggtgatcagaccattagtcaagacatggttgaaactgctgcgcgtgcgacccatattcatgactttatcatgtccttaccaaaagggtacaatacctatgtctcagatgatgacaatgtcttttcaacaggtcaaaagcagttgatttctattgctaggacgctactgactgaccctgaagtgttgattttggatgaggccacttcaaatgttgatacggttaccgaaagtaaaattcaacgggccatggaagctatcgtggcaggtcgaactagctttgtcattgctcaccgcctcaaaaccattttaaatgccgatcacattattgtgttgaaagatggcaaggtcattgagcaaggaaatcatcatgagctattgcatcaaaaaggcttttatgccgaattgtatcacaatcaatttgtctttgaatag

SEQ ID NO: 98 - protein, 595 aa, Streptococcus pyogenes
MMKTARFFWFYFKRYRFSFTVIAVAVILATYLQVKAPVFLGESLTELGKIGQAYYVAKMSGQTHFSPDLSAFNAVMFKLLMTYFFTVLANLIYSFLLTRVVSHSTNRMRKGLFGKLERLTVAFFDRHKDGEILSRFTSDLDNIQNSLNQSLIQVVTNIALYIGLVWMMFRQDSRLALLTIASTPVALIFLVINIRLARKYTNIQQQEVSALNAFMDETISGQKAIIVQGVQEDTMTAFLKHNERVRQATFKRRLFSGQLFPVMNGMSLINTAIVIFVGSTIVLSDKSMPAAAALGLVVTFVQYSQQYYQPMMQIASSWGELQLAFTGAHRIQEMFDETEEVRPQNAPAFTSLKEAVAINHVDFGYLPGQKVLSDVSIVAPKGKMIAVVGPTGSGKTTIMNLINRFYDVDAGSITFDGRDIRDYDLDSLRQKVGIVLQESVLFSGTITDNIRFGDQTISQDMVETAARATHIHDFIMSLPKGYNTYVSDDDNVFSTGQKQLISIARTLLTDPEVLILDEATSNVDTVTESKIQRAMEAIVAGRTSFVIAHRLKTILNADHIIVLKDGKVIEQGNHHELLHQKGFYAELYHNQFVFE

SEQ ID NO: 99 - DNA, 1728 bp, Streptococcus pyogenes
ttggaaacgatattacaaacaaaattaccagtagctcaactggtggagcagctaacggagtggctaactaaaactttctcaggtctatttgatattatgcaagtagttggtagctttttgatggattggatgaccaaaacacttttatttatccacccgttactttttattgttctagtaacagcagggatgtttttccttgctaagaaaaaatggcctttgccaacctttaccttgttaggattgctctttatttacaatcaagggttatggaagcagctaatgaatacctttactctggtgttagtagctagtttgatttcggtacttattggtattccgctggggatttggatggctaaaaatgccactgtccgtcagattgtgaatcctattttggactttatgcaaaccatgccggcttttgtttacttgattcctgccgttgccttttttggtattggtatggtgcctggagtatttgcttcagtcatctttgccttaccaccaacggttcgtttcacaaatttggccattcgtgacattccaacagaattgattgaggcctcagatgcctttgggtcaactgggaaacaaaagctctttaaagtggaattgcctttagctaaaaatactattatggcaggtgttaatcagaccatgatgttagccctttccatggtagtaacaggctccatgattggtgctcctggtttaggacgtgaagtcttgtcagcccttcaacacgctgatattggtagtggatttgtcagtggtcttgccttggttatcttggcgattgtgcttgaccgtatgacacagttgttcaatagcaaacctcaagaaaaagccaaagctggcaaaaccaataaatggattggtttagcagcccttgctgtctttttgatagctgctttaggacgcggtattatggctatgacttctggtatggcagataagggtgaaactgttaacatcgcttacgtgcagtgggattctgaggttgcctcaactcatgtgattgcagaagttttgaaaaacgaaggttaccatgtgaccttgactccgcttgacaatgccgttatgtggcaaaccgttgcaaatgggaacgctgatttttcaactagtgcttggttgccagtcacccatggccaacaatatcagaaatacaagtcaaaattagatgatttaggacctaacctaaaagggaccaaacttggtttagctgttccaaaatacatgacagatgtcaatagtattgaggacttaagcaaacaagccgatcaaaaaatcacagggatcgaaccaggtgcaggtatcatggcagcagcccaaaagactctaaaagagtatcataatctatctagttgggagttagtggcggcatcaacaggagccatgacgacttccttggatcaagcgatcaagaaaaaagatcctattgttgtgacagcttggtcaccacactggatgtttgccaagtatgacttgaagtaccttaaagatcctaaagaaatctttggctcgactgagaacatcaataccattgctcgtaaaggcttgaaaaaagaacttccaaatgtctacaaaatcattgataagttccactggacccaaaaagatatggaagcagtcatgcttgacatcaacaaaggcatgagtccagaagctgccgccaaaaaatgggtagaggcaaacaaatctaaagtatcaagttggacaaaataa

SEQ ID NO: 100 - protein, 575 aa, Streptococcus pyogenes
METILQTKLPVAQLVEQLTEWLTKTFSGLFDIMQVVGSFLMDWMTKTLLFIHPLLFIVLVTAGMFFLAKKKWPLPTFTLLGLLFIYNQGLWKQLMNTFTLVLVASLISVLIGIPLGIWMAKNATVRQIVNPILDFMQTMPAFVYLIPAVAFFGIGMVPGVFASVIFALPPTVRFTNLAIRDIPTELIEASDAFGSTGKQKLFKVELPLAKNTIMAGVNQTMMLALSMVVTGSMIGAPGLGREVLSALQHADIGSGFVSGLALVILAIVLDRMTQLFNSKPQEKAKAGKTNKWIGLAALAVFLIAALGRGIMAMTSGMADKGETVNIAYVQWDSEVASTHVIAEVLKNEGYHVTLTPLDNAVMWQTVANGNADFSTSAWLPVTHGQQYQKYKSKLDDLGPNLKGTKLGLAVPKYMTDVNSIEDLSKQADQKITGIEPGAGIMAAAQKTLKEYHNLSSWELVAASTGAMTTSLDQAIKKKDPIVVTAWSPHWMFAKYDLKYLKDPKEIFGSTENINTIARKGLKKELPNVYKIIDKFHWTQKDMEAVMLDINKGMSPEAAAKKWVEANKSKVSSWTK

SEQ ID NO: 101 - DNA, 1725 bp, Streptococcus pyogenes
atgaaggacatgtctaataaaaaaacatttaaaaaatacagtcgcgtcgctgggctactgacggcagctcttatcattggtaaccttgttactgctaatgctgaatcgaacaaacaaaacactgctagtacagaaaccacaacgacaaatgagcaaccaaagccagaaagtagtgagctaactactgaaaaagcaggtcagaaaacggatgatatgcttaactctaacgatatgattaagcttgctcccaaagaaatgccactagaatctgcagaaaaagaagaaaaaaagtcagaagacaaaaaaaagagcgaagaagatcacactgaagaaatcaatgacaagatttattcactaaattataatgagcttgaagtacttgctaaaaatggtgaaaccattgaaaattttgttcctaaagaaggcgttaagaaagctgataaatttattgtcattgaaagaaagaaaaaaaatatcaacactacaccagtcgatatttccattattgactctgtcactgataggacctatccagcagcccttcagctggctaataaaggttttaccgaaaacaaaccagacgcggtagtcaccaagcgaaacccacaaaaaatccatattgatttaccaggtatgggagacaaagcaacggttgaggtcaatgaccctacctatgccaatgtttcaacagctattgataatcttgttaaccaatggcatgataattattctggtggtaatacgcttcctgccagaacacaatatactgaatcaatggtatattctaagtcacagattgaagcagctctaaatgttaatagcaaaatcttagatggtactttaggcattgatttcaagtcgatttcaaaaggtgaaaagaaggtgatgattgcagcatacaagcaaattttttacaccgtatcagcaaaccttcctaataatcctgcggatgtgtttgataaatcggtgacctttaaagagttgcaacgaaaaggtgtcagcaatgaagctccgccactctttgtgagtaacgtagcctatggtcgaactgtttttgtcaaactagaaacaagttctaaaagtaatgatgttgaagcggcctttagtgcagctctaaaaggaacagatgttaaaactaatggaaaatattctgatatcttagaaaatagctcatttacagctgtcgttttaggaggagatgctgcagagcacaataaggtagtcacaaaagactttgatgttattagaaacgttatcaaagacaatgctaccttcagtagaaaaaacccagcttatcctatttcatacaccagtgttttccttaaaaataataaaattgcgggtgtcaataacagaactgaatacgttgaaacaacatctaccgagtacactagtggaaaaattaacctgtctcatcaaggcgcgtatgttgctcaatatgaaatcctttgggatgaaatcaattatgatgacaaaggaaaagaagtgattacaaaacgacgttgggacaacaactggtatagtaagacatcaccatttagcacagttatcccactaggagctaattcacgaaatatccgtatcatggctagagagtgcactggcttagcttgggaatggtggcgaaaagtgatcgacgaaagagatgtgaaactgtctaaagaaatcaatgtcaatatctcaggatcaaccttgagcccatatggttcgattacttataagtag

SEQ ID NO: 102 - protein, 574 aa, Streptococcus pyogenes
MKDMSNKKTFKKYSRVAGLLTAALIIGNLVTANAESNKQNTASTETTTTNEQPKPESSELTTEKAGQKTDDMLNSNDMIKLAPKEMPLESAEKEEKKSEDKKKSEEDHTEEINDKIYSLNYNELEVLAKNGETIENFVPKEGVKKADKFIVIERKKKNINTTPVDISIIDSVTDRTYPAALQLANKGFTENKPDAVVTKRNPQKIHIDLPGMGDKATVEVNDPTYANVSTAIDNLVNQWHDNYSGGNTLPARTQYTESMVYSKSQIEAALNVNSKILDGTLGIDFKSISKGEKKVMIAAYKQIFYTVSANLPNNPADVFDKSVTFKELQRKGVSNEAPPLFVSNVAYGRTVFVKLETSSKSNDVEAAFSAALKGTDVKTNGKYSDILENSSFTAVVLGGDAAEHNKVVTKDFDVIRNVIKDNATFSRKNPAYPISYTSVFLKNNKIAGVNNRTEYVETTSTEYTSGKINLSHQGAYVAQYEILWDEINYDDKGKEVITKRRWDNNWYSKTSPFSTVIPLGANSRNIRIMARECTGLAWEWWRKVIDERDVKLSKEINVNISGSTLSPYGSITYK

SEQ ID NO: 103 - DNA, 648 bp, Streptococcus pyogenes
atgaaaaaatctatattaagaattttagctattggttatttacttatgagtttttgtttgttagactccgtagaggcagaaaacctcactgcaagcattaatattgaagttattaatcaagttgatgttgctaccaacaaacaatcctctgacatagatgaaacgtttatgtttgtaattgaagcgttagataaagaaagtcctttacctaattcggtaactacttctgttaagggaaatgggaaaacatcatttgaacagttgactttttcagaagttggacaatatcattataaaattcatcaactgttaggtaagaatagtcaatatcattatgatgaaacagtatatgaagttgttatttacgtattgtataatgagcaaagtggtgctttagaaactaacctagtttctaacaaacttggagaaaccgaaaaatcggagcttatttttaaacaagaatatagtgaaaaaacaccggaacctcatcaaccagatacaactgagaaggaaaaacctcagaaaaaacgtaatggtattttgccatcaactggtgaaatggtgagttacgtatctgctttaggaattgtcttagtggctaccattactttgtattctatttataaaaagctaaagacaagcaaatag

SEQ ID NO: 104 - protein, 215 aa, Streptococcus pyogenes
MKKSILRILAIGYLLMSFCLLDSVEAENLTASINIEVINQVDVATNKQSSDIDETFMFVIEALDKESPLPNSVTTSVKGNGKTSFEQLTFSEVGQYHYKIHQLLGKNSQYHYDETVYEVVIYVLYNEQSGALETNLVSNKLGETEKSELIFKQEYSEKTPEPHQPDTTEKEKPQKKRNGILPSTGEMVSYVSALGIVLVATITLYSIYKKLKTSK

SEQ ID NO: 105 - DNA, 2313 bp, Streptococcus pyogenes
atgaggtattttatggtgaaatggaacacgaaacaaaagcgtataagtcatcaaagattaggtctcttggatttggggccggtgctattacgtacgttgagactactgtctaactttttttatattgttatcttcctttttggaatgatgggatttggtatggcatttgggtatttggctagtcagattgaatctgttaaggtaccaagtaaagaaagtttagtcaaacaagttgaatcattaacgatgatttcgcaaatgaactattctgataatagtttaatttctactttagatacggatttacttcgaacaccagtagctaatgatgcgatttcagagaatatcaaaaaagctattgtatcaacagaagacgaacattttcaagaacataaaggtatcgtgccaaaagctgtttttcgggcaacattggcttctgtattgggatttggagaagctagtggaggttcgaccttaacacagcaattagtcaagcaacaagttttgggagacgatcccacatttaagcgcaagtctaaggagatcgtttacgctcttgccttagagcgttatatgtccaaagacaatatcttatgtgattatcttaatgtttcaccttttggccgtaacaacaagggtcaaaatattgctggtgttgaagaagctgcgcgtggcatttttggcgtttctgccaaagatttaacggtgccacaggcagcatttttggcgggtcttccgcagagtcctattgtttactctccttatttgtcaacgggacaactgaaatcagaaaaggacatggcttatggcatcaagcgtcagcaaaatgttctctttaacatgtaccgtacaggtgttctgtctaaaaaagaatacgaggactataaggcttatccgattcaaaaggattttattcaaccgggaagtgcaatagtaaataatcacgattacctttattacacggtgttagcggatgctaagaaagccatgtatagctatttgattaagcgagataaggtgtctagtcgtgacttgaaaaatgacgagactaaggctgcttatgaagagagagccttaacagaattgcaacagggtggctataccatcaccacaaccattaataagcctatttacaatgcgatgcagacagcggcagctcagtttggtggcttgttagatgatggcactggtacagttcaaatgggaaatgtcttgacagacaatgcgactggtgctgtgttaggttttgttggtggtagagattatgctctgaatcaaaataatcatgctttcaatacagttagatcgccaggttctagcattaaaccgataatcgcttatggtcctgctattgatcaaggtttaatggggagtgctagcgttttgtctaattacccaacaacttactcgagtggccaaaaaatcatgcatgctgatagtgaaggaacagccatgatgccacttcaagaggccctaaatacttcttggaacatcccagctttttggacacagaaattactgcgtgaaaaaggtgtcgatgtcgaaaattatatgacaaaaatgggttataagattgcagactactcgattgaaagtttacctctagggggcggtattgaagtctcggttgctcaacaaaccaatgcttaccaaatgctttcaaacaatggcttatatcaaaagcaatatattgtagataagattactgctagcgatggtacagtcgtttacaaacatgaaaataagccaattcgtattttttctgcagcaacagctacgattttacaagaattgttgagaggtccgattacttcaggcgctacgactactttcaagaaccgtttggcggctattaatccgtggcttgctaatgctgattggattggtaagaccggaacaactgagaattatacggatgtttggctagtcctgtctactccaaaagttactttaggcggttgggcaggacatgatgacaatacctcattagcgccattaacaggatataacaataattctaattatcttgcctatttagctaatgccattaatcaggccgatcccaatgttattggagtagggcaacgcttcaacttagatccaggagtcattaaggcgaatgtcttgaagtcaacaggtttacaaccaggaactgttaatgtcaatggacatactttttctgttggtggagaaatgaccaccagtctatggtcccaaaaaggaccgggggctatgacttaccgatttgctattggtggcacggatgccgattatcaaaaagcctgggggaacttcgggttcagaaaaaattag

SEQ ID NO: 106 - protein, 770 aa, Streptococcus pyogenes
MRYFMVKWNTKQKRISHQRLGLLDLGPVLLRTLRLLSNFFYIVIFLFGMMGFGMAFGYLASQIESVKVPSKESLVKQVESLTMISQMNYSDNSLISTLDTDLLRTPVANDAISENIKKAIVSTEDEHFQEHKGIVPKAVFRATLASVLGFGEASGGSTLTQQLVKQQVLGDDPTFKRKSKEIVYALALERYMSKDNILCDYLNVSPFGRNNKGQNIAGVEEAARGIFGVSAKDLTVPQAAFLAGLPQSPIVYSPYLSTGQLKSEKDMAYGIKRQQNVLFNMYRTGVLSKKEYEDYKAYPIQKDFIQPGSAIVNNHDYLYYTVLADAKKAMYSYLIKRDKVSSRDLKNDETKAAYEERALTELQQGGYTITTTINKPIYNAMQTAAAQFGGLLDDGTGTVQMGNVLTDNATGAVLGFVGGRDYALNQNNHAFNTVRSPGSSIKPIIAYGPAIDQGLMGSASVLSNYPTTYSSGQKIMHADSEGTAMMPLQEALNTSWNIPAFWTQKLLREKGVDVENYMTKMGYKIADYSIESLPLGGGIEVSVAQQTNAYQMLSNNGLYQKQYIVDKITASDGTVVYKHENKPIRIFSAATATILQELLRGPITSGATTTFKNRLAAINPWLANADWIGKTGTTENYTDVWLVLSTPKVTLGGWAGHDDNTSLAPLTGYNNNSNYLAYLANAINQADPNVIGVGQRFNLDPGVIKANVLKSTGLQPGTVNVNGHTFSVGGEMTTSLWSQKGPGAMTYRFAIGGTDADYQKAWGNFGFRKN

SEQ ID NO: 107 - DNA, 366 bp, Streptococcus pyogenes
atggctcgtattgctggagttgatattccaaatgataaacgcgtagtaatttcacttacttatgtttacggaattggtcttgcaacatctaaaaaaatcttagcagctgcaggtatttctgaagatatccgtgttaaagatttaacatcagatcaagaagatgctatccgtcgtgaagtggatgcaatcaaagttgaaggtgaccttcgacgtgaagtaaacatgaacattaaacgtttgatggaaatcggttcataccgtggaatccgtcatcgtcgtggacttcctgtccgtggacaaaatactaaaaacaatgctcgcactcgtaaagggaaagctgttgcgattgcaggtaagaaaaaataa

SEQ ID NO: 108 - protein, 121 aa, Streptococcus pyogenes
MARIAGVDIPNDKRVVISLTYVYGIGLATSKKILAAAGISEDIRVKDLTSDQEDAIRREVDAIKVEGDLRREVNMNIKRLMEIGSYRGIRHRRGLPVRGQNTKNNARTRKGKAVAIAGKKK

SEQ ID NO: 109 - DNA, 369 bp, Streptococcus pyogenes
atgattcaacaagaaactcgcttgaaagttgctgataatagcggtgctcgtgagatcttgactatcaaagtacttggtggttcaggacgtaaattcgctaacatcggtgacgtaatcgttgcttctgtaaaacaagctactcctggtggagcagttaaaaaaggtgatgtggttaaagctgttatcgttcgtacaaaaactggtgcacgccgtccagacggttcatacatcaaatttgacgacaatgctgctgtaatcatccgtgatgataaaactcctcgcggaactcgtatctttggcccagttgcacgcgaattgcgtgagggtggctacatgaagatcgtatcacttgcaccagaagtactttaa

SEQ ID NO: 110 - protein, 122 aa, Streptococcus pyogenes
MIQQETRLKVADNSGAREILTIKVLGGSGRKFANIGDVIVASVKQATPGGAVKKGDVVKAVIVRTKTGARRPDGSYIKFDDNAAVIIRDDKTPRGTRIFGPVARELREGGYMKIVSLAPEVL

SEQ ID NO: 111 - DNA, 834 bp, Streptococcus pyogenes
gtgggtattaaagtttataaaccaacgacaaatggccgtcgtaacatgacttctttggatttcgcggaaatcacaacaagcacgcctgagaaatcattgcttgtttctcttaagagcaaagctggtcgtaacaacaatggtcgcatcacagttcgtcaccaaggtggtggacacaaacgtcattaccgtttgatcgacttcaaacgtaacaaagatggcgttgaagcagttgttaaaacaatcgaatacgatccaaaccgtactgcaaacatcgcacttgtacattacactgacggtgtgaaagcttacatcattgcacctaaaggtcttgaagtaggtcaacgtattgtttctggtccagatgcagatatcaaagttggtaacgcacttccattagcaaacattcctgtcggtacagttgttcacaatattgagttgaaacctggtaaaggtggagaacttgttcgtgcagctggagcttctgctcaagtacttggtcaagaaggtaaatacgttcttgttcgtcttcaatcaggcgaagttcgtatgattcttggtacatgccgtgcaactatcggtactgttggtaacgaacaacaatcacttgttaacattggtaaagcaggacgtagccgttggaaaggtatccgcccaacagttcgtggttctgtaatgaaccctaacgatcacccacacggtggtggtgaaggtaaagcaccagttggacgtaaagcgccatcaactccatggggtaaaccagcgcttggtcttaaaactcgtaacaagaaagctaaatcagacaaacttatcgttcgtcgtcgtaacgaaaaataa

SEQ ID NO: 112 - protein, 277 aa, Streptococcus pyogenes
MGIKVYKPTTNGRRNMTSLDFAEITTSTPEKSLLVSLKSKAGRNNNGRITVRHQGGGHKRHYRLIDFKRNKDGVEAVVKTIEYDPNRTANIALVHYTDGVKAYIIAPKGLEVGQRIVSGPDADIKVGNALPLANIPVGTVVHNIELKPGKGGELVRAAGASAQVLGQEGKYVLVRLQSGEVRMILGTCRATIGTVGNEQQSLVNIGKAGRSRWKGIRPTVRGSVMNPNDHPHGGGEGKAPVGRKAPSTPWGKPALGLKTRNKKAKSDKLIVRRRNEK

SEQ ID NO: 113 - DNA, 627 bp, Streptococcus pyogenes
atgacaaaaggaatcttagggaaaaaagtgggaatgactcaaattttcactgaatcaggcgaattcatccctgttactgtcattgaagcaactccaaacgttgtgcttcaagttaaaactgttgaaacagacggttatgaagcagttcaggttggttttgatgacaaacgtgaagtcttgagtaacaaacctgccaaaggccatgttgcaaaagcaaacacagctcctaagcgcttcattcgtgaattcaaaaacattgaaggcttagaagttggtgcagaattatctgtagaacaatttgaagctggtgatgttgttgacgtcacagggatatcaaaaggtaaaggtttccaaggtgttatcaaacgccatggtcaatcacgtggtcctatggctcacggttctcgttaccatcgtcgcccaggttctatgggacctgttgcgcctaaccgcgttttcaaaaacaaacgcttggcaggacgtatgggtggtaaccgtgtaacagttcaaaaccttgaaattgtacaagttatcccagaaaagaacgttatccttgttaaaggtaacgtaccaggtgctaagaaatctcttatcactatcaagtcagcagttaaagctgctaaataa

SEQ ID NO: 114 - protein, 208 aa, Streptococcus pyogenes
MTKGILGKKVGMTQIFTESGEFIPVTVIEATPNVVLQVKTVETDGYEAVQVGFDDKREVLSNKPAKGHVAKANTAPKRFIREFKNIEGLEVGAELSVEQFEAGDVVDVTGISKGKGFQGVIKRHGQSRGPMAHGSRYHRRPGSMGPVAPNRVFKNKRLAGRMGGNRVTVQNLEIVQVIPEKNVILVKGNVPGAKKSLITIKSAVKAAK

SEQ ID NO: 115 - DNA, 309 bp, Streptococcus pyogenes
atggcaaacaaaaaaatccgtatccgtttgaaagcgtacgaacaccgtacacttgatacagcggcagaaaaaatcgttgaaactgcaacacgtacaggtgctacagttgctggaccagttccacttccaactgaacgcagtctttacacaattattcgtgcgactcacaaatacaaagattctcgcgaacaatttgaaatgcgtacacacaaacgtttggtagacatcatcaatccaacacaaaaaactgttgatgctttgatgaaacttgatcttccaagtggtgtcaacgtagaaatcaaactttaa

SEQ ID NO: 116 - protein, 102 aa, Streptococcus pyogenes
MANKKIRIRLKAYEHRTLDTAAEKIVETATRTGATVAGPVPLPTERSLYTIIRATHKYKDSREQFEMRTHKRLVDIINPTQKTVDALMKLDLPSGVNVEIKL

SEQ ID NO: 117 - DNA, 372 bp, Streptococcus pyogenes
atgaagaagcctagtattgttcaattaaataatcattatattaagaaagagaatctcaaaaaaaaatttgaagaagaagaatctcaaaaaagaaatcgttttatgggatggatccttgtaagtatgatgtttttatttattttgccaacttataatcttgtcaaaagttatgttgattttgaaaagcaaaatcaacaggtggttaaattaaaaaaagagtataatgaattgtcagagagtacaaaaaaagaaaaacaattagcagaacgactaaaagatgataattttgtcaaaaaatatgctagggcaaaatactatttatcgcgtgaaggagaaatgatttatcctattccaggactattaccaaaatga

SEQ ID NO: 118 - protein, 123 aa, Streptococcus pyogenes
MKKPSIVQLNNHYIKKENLKKKFEEEESQKRNRFMGWILVSMMFLFILPTYNLVKSYVDFEKQNQQVVKLKKEYNELSESTKKEKQLAERLKDDNFVKKYARAKYYLSREGEMIYPIPGLLPK

SEQ ID NO: 119 - DNA, 1224 bp, Streptococcus pyogenes
atgccaagtatgaaacatatcttaaaatccttaagtattttactaattggatttttaggaggattaatagcaattattacattcaataatctctacccacattctccatcaaaaataaattcaggtaaggcaacaactagtaatatggtttttaacaacacaaccaatactactaaagctgtcaaagctgttcaaaatgcagttgtatcagttattaattatcaagataacccttcttcatccctttctaacccttatacaaaactctttggagaagggcgttcaaaagagaataaggatgctgaattatctatttttagtgaaggatctggggtcatttatcgaaaagatggcaactccgcttacgttgttactaataaccatgttatcgacggagctaaacgaattgaaattcttatggcagacggatctaaagttgttggtgaattagttggagctgatacttattcggatttagctgttgttaagatctcttcagataagataaaaacagtagctgaatttgcagattctacaaaactaaatgttggagaagttgctattgctatcggcagcccactaggaacacaatacgctaattctgttactcaaggaatcgtctctagtttaagtcgtactgtaactttaaaaaacgagaatggtgagactgtctcaacaaatgctattcagacagatgctgctattaaccctggaaactctggtggaccactaattaatattgaggggcaagtaatcggaattaattcaagtaaaatttcttctaccccaactggtagcaacggtaatagtggtgctgttgaaggaattggttttgctatcccatctactgatgttattaaaattattaaacaactagaaactaatggtgaagttatcagacctgctcttggaatatccatggtcaatttaaatgacttatccacaaatgctcttagtcaaattaatattccaactagtgtaactggtggtattgtagtagcagaagttaaggaaggaatgccggcatctggcaaacttgctcagtacgatgtgattacagaaattgatggcaaaacagttaattcaattagtgatttacaaagtagtctatacggacacgatattaatgatactattaaagtaactttttatagaggaactacaaagaaaaaagcagatatcaaattaacaaaaactactcaagatttgactaaaacgcagtaa

SEQ ID NO: 120 - protein, 407 aa, Streptococcus pyogenes
MPSMKHILKSLSILLIGFLGGLIAIITFNNLYPHSPSKINSGKATTSNMVFNNTTNTTKAVKAVQNAVVSVINYQDNPSSSLSNPYTKLFGEGRSKENKDAELSIFSEGSGVIYRKDGNSAYVVTNNHVIDGAKRIEILMADGSKVVGELVGADTYSDLAVVKISSDKIKTVAEFADSTKLNVGEVAIAIGSPLGTQYANSVTQGIVSSLSRTVTLKNENGETVSTNAIQTDAAINPGNSGGPLINIEGQVIGINSSKISSTPTGSNGNSGAVEGIGFAIPSTDVIKIIKQLETNGEVIRPALGISMVNLNDLSTNALSQINIPTSVTGGIVVAEVKEGMPASGKLAQYDVITEIDGKTVNSISDLQSSLYGHDINDTIKVTFYRGTTKKKADIKLTKTTQDLTKTQ

SEQ ID NO: 121 - DNA, 1560 bp, Streptococcus pyogenes
gtgatcgagttaaacgatgaattcatccgaaaagagacgatagaactggccaacgatggcccacgagtacacaccactcaatatgaaactaaagtacctcggcttcataaatgctatctgcttttctttagcattattatcagttctttaacaattgcagtaccttttttaacagatgcagccaatggtcttcagtcccaaaacttatatataggaatgatgttaacgaaggggcaacttccctatagtgctgcttttacaacaggagggctcttttactttgttatcattgcattaagttattatttgggatcgacactttggctagtctttgttcaggtgttttgtttttacttatctggtttatatctttataaactcattaattatatgacaggctttcaaaaagtggctttaactttttcaattagctactatttattatctgttagtcttggttttgggggattgtatcctactcaactggctatgccatttatattaatatcggcttggtttttaactaagtattttgcctgtttagtgaaagatgaggcatttattctttttggctttgtaggtgctcttgcaatgctaattgacccgagtacccttatcttttggtcttttgcttgtgtgacagttttttcttataatataagccaaaagcatcttgcaagaggtttttatcaactgctagcttcgatttttggaatgattttagttttttacacagcaggatatttcattttgaacttacaagtgctaaatccttatttatcacaaacgatgatttatccttttactttttttaaatcaggaaacttatcgttgctttttggactggctattcagttgttcttcgctttggggcttggtcttttgacgggaatggagaatgtcattaggcgatttaaaaacaattctgatagggtcgtcaagtggctatttgtcatggtcattctagaatctatacttgtggctatattttcacaagactatcgcccctatcatcttttacctcttttaccttttggattaattttgactgctattcctgttggctatcagtatggtataggattaggtcagagtagtcatcgcagacgtcatggtaaaaatggtgttggtcgagtaatgatgatttatcttaagagacacttttatttgccaattttaattgtagggacaatactaatctgttctacttattgtttcattagtagtattcctcttaatcaggagcgtgatcatattgctagttatttagaacagaaactaaataaaactcaatctatttatgtttgggatgatacttctaaaatttatttggacagtaaagctaaatctgtttctcaatttagttctcctgacatcaatacgcaaaaagagagtcatcgaaaaatattagaagatgaactattagaaaataaggctgcttatatcgttgttaatcgctataaaaacctgcctaaaatcattcaaaaagtattatctactaattacaaagtagataaacagataacgacaaaaagttttattgtttatcagaaaaagtaa

SEQ ID NO: 122 - protein, 519 aa, Streptococcus pyogenes
MIELNDEFIRKETIELANDGPRVHTTQYETKVPRLHKCYLLFFSIIISSLTIAVPFLTDAANGLQSQNLYIGMMLTKGQLPYSAAFTTGGLFYFVIIALSYYLGSTLWLVFVQVFCFYLSGLYLYKLINYMTGFQKVALTFSISYYLLSVSLGFGGLYPTQLAMPFILISAWFLTKYFACLVKDEAFILFGFVGALAMLIDPSTLIFWSFACVTVFSYNISQKHLARGFYQLLASIFGMILVFYTAGYFILNLQVLNPYLSQTMIYPFTFFKSGNLSLLFGLAIQLFFALGLGLLTGMENVIRRFKNNSDRVVKWLFVMVILESILVAIFSQDYRPYHLLPLLPFGLILTAIPVGYQYGIGLGQSSHRRRHGKNGVGRVMMIYLKRHFYLPILIVGTILICSTYCFISSIPLNQERDHIASYLEQKLNKTQSIYVWDDTSKIYLDSKAKSVSQFSSPDINTQKESHRKILEDELLENKAAYIVVNRYKNLPKIIQKVLSTNYKVDKQITTKSFIVYQKK

SEQ ID NO: 123 - DNA, 3075 bp, Streptococcus pyogenes
atgacgaagggtattcgatttcaattgcttggcagtccccacatttttcttgatgacaaagaacaattttttgcctttgccaaagcaaatgctctcctttattacttagtggttaatggatctgttagccgcgaggtggcggcgagtctactttgggaaaataagaacacgcaaacagcgaaaaagaatttacgaaacgctatctaccaggtcaataaagtcttgcaagctgatgtgattatttgtcccaatcgcaacctgctggttttgaataaaacacttgatatcaaaacagatattaacctttttctggctgatccgctagctcacttagaactctaccaaggggagtttttgcagggcttttaccttaaaagtggtgaggaatttgatctttgggtttcaaaaatgcgtatgcagtatgaacaggtatacctaaaagcgtgttaccaaaaaattgaagaaaagctctctttagatgccattgaagatgtcgaggaacatttaaaacagcttattgaacgtgatgaatttgaagagaaaaattatcagctcttgatgaggctttatcagcaggggaattgtcctggtaaggtcatcgaaacttattatcagttggctaatgtgttggataaggagctagggattcagccaagtttgcaaagccaacagatttatcaggaagtggtcgctaaagatcgtaatgaacgcaaaatcaagcattttttgcgcaacagtaatcattttttggggcggattgatgagattaagcagctggaaaacttttttgccaactgtttggcctgccaagaggtaggagctctgctcttaattggtgatacagggattgggaaacgaaccctagccagacaggtcttagccaatcaaacccaaacgtttcaaattgtcacagctaaatgttttcgtgaagaggctatggattccttattgccttggcgtaatatcttagatggcctgggagatttggtgattcaaaaccgcttattgaccaccaaagcttggaaggctgctcttaaacgctgttttcctgtggcaaccatttttcaagaagataacaaccaaccctttatcaaggaccacaccagcttgttggtttcctttattgttgatattttacaacatttggcagaaatcaaggcgctggtaatccttattgaggattgtcactggatggatgaggatagtttgaccttgttgcaacgggtcatgaatcaattggtccactatccgattgcttttgtcttgaccaagcatctaggaacgactcctgagctcggtctttgtttgaatgctttgatgagtcaagggcgtttagaaagcatttgtttggagccttttaatcggcaagaaagtttggtttatattaacagtcaactgggtagtcagccagtgacggcagaagaaatggagcacctctatcaagccagccaaggcaaccctttctttttgtcagaatacactcaggccctactgcgtcacgaaaaatttgtgcctttaacgcctgccattaaggctaagttgggtcttaaactagctaatctaagtagtcgtgatgacgcattgttaaactatttgtcttgttgtcggaggcctatccctctaaataccctcgctcaattgatgttactgcctttagaagaagtgatcgagatggtggataatctggggcactactatattttggtagaagaaagcgtaggagaggaagtgttgatttcatttcgtcagcggattattcaactctatagttatgaccgtttatctttgtcaaaaaggcgtttattgcacggacaaattgccaaacggttagaagatttactgcctattttgacaccaagccctcacttattagatgacattgcttaccattatcaggaatcacggcaggtgattaaggctttggaatacaaccttaactatctagatgctaccttgccatttcagcatgagctgtttcccatttattcaaagagtattggctccttggaaaagtcagatcgtgaccatcaacgcttaatggaagagcagtttgataagattcgtcaaagcattgcggatttggaactgacctatgataataaccgtgatttccagcagttgcttattcgtttttcttaccttgaaggccgttatgatattcgaacagggaggtatcaagaagggattaaacacattcaaaaggtcatcgctttggcaaccgagctaaaacagccctccttcttgctagaaggctatcgccagttaattcattactgtatccaagtggaaaacaagccagaaatgcgttattacactagtctttcattggaggcagcggttgctgctaatcattttgaggccattgcgattagtttgcggttaaacggtctctatcatttgattattggggagttaaatgaggcagagcgtctgcttcaacagtcgattgacttcttcaaggtgacgccaggcttgcaagctaactatgcgattcagattgctgctgccttagattatttgggggagattgcccagattcgctatcagtttgaaaaggccgttgcttatcaaaaacaagccattgccttgaccgaaaacaagccagctgagttatcggcgagtattttttatattggattagggatttcctacttttatttagctgattttgaacaagctgagcaaatcttgagtttggctaaggaagctttggtcaatcatagttatccttggaaagaaacgcaacttgaaatttacctggctatgattcaatggaaaaagggcaattatcagccagccttgaccctacttgattacagagaaaccttgatgtctaggtatcgcaatccgcgtgataagggcttggttttctatttgatggctgtggtcaagtaccaattgatatttcaaggagctaccctaagtcagcaggaaaaagaaatggcagaccacctgttgtcagaatcctttgagtattattatgagattgctagtactaacctcaacccttaccgagattgtcatttggtgagtgagttgaacgatttgcgtcaacaattatctgctaaaagctaa

SEQ ID NO: 124 - protein, 1024 aa, Streptococcus pyogenes
MTKGIRFQLLGSPHIFLDDKEQFFAFAKANALLYYLVVNGSVSREVAASLLWENKNTQTAKKNLRNAIYQVNKVLQADVIICPNRNLLVLNKTLDIKTDINLFLADPLAHLELYQGEFLQGFYLKSGEEFDLWVSKMRMQYEQVYLKACYQKIEEKLSLDAIEDVEEHLKQLIERDEFEEKNYQLLMRLYQQGNCPGKVIETYYQLANVLDKELGIQPSLQSQQIYQEVVAKDRNERKIKHFLRNSNHFLGRIDEIKQLENFFANCLACQEVGALLLIGDTGIGKRTLARQVLANQTQTFQIVTAKCFREEAMDSLLPWRNILDGLGDLVIQNRLLTTKAWKAALKRCFPVATIFQEDNNQPFIKDHTSLLVSFIVDILQHLAEIKALVILIEDCHWMDEDSLTLLQRVMNQLVHYPIAFVLTKHLGTTPELGLCLNALMSQGRLESICLEPFNRQESLVYINSQLGSQPVTAEEMEHLYQASQGNPFFLSEYTQALLRHEKFVPLTPAIKAKLGLKLANLSSRDDALLNYLSCCRRPIPLNTLAQLMLLPLEEVIEMVDNLGHYYILVEESVGEEVLISFRQRIIQLYSYDRLSLSKRRLLHGQIAKRLEDLLPILTPSPHLLDDIAYHYQESRQVIKALEYNLNYLDATLPFQHELFPIYSKSIGSLEKSDRDHQRLMEEQFDKIRQSIADLELTYDNNRDFQQLLIRFSYLEGRYDIRTGRYQEGIKHIQKVIALATELKQPSFLLEGYRQLIHYCIQVENKPEMRYYTSLSLEAAVAANHFEAIAISLRLNGLYHLIIGELNEAERLLQQSIDFFKVTPGLQANYAIQIAAALDYLGEIAQIRYQFEKAVAYQKQAIALTENKPAELSASIFYIGLGISYFYLADFEQAEQILSLAKEALVNHSYPWKETQLEIYLAMIQWKKGNYQPALTLLDYRETLMSRYRNPRDKGLVFYLMAVVKYQLIFQGATLSQQEKEMADHLLSESFEYYYEIASTNLNPYRDCHLVSELNDLRQQLSAKS

SEQ ID NO: 125 - DNA, 561 bp, Streptococcus pyogenes
atgtctctaattggaaaagaaattgctgaattttcagctcaagcttatcacgatggaaaattcatcactgttacaaatgaagacgttaaaggaaaatgggcagttttttgtttctacccagcagacttttcatttgtttgcccaactgaactcggtgaccttcaagagcaatacgaaacactgaaatctcttggtgtagaagtttattctgtctctactgatactcattttgttcataaagcttggcatgatgattcagatgtggttggcactatcacataccctatgattggtgacccttcacaccttatttcacaagcctttgaagtgcttggcgaagacggacttgctcaacgtggaacatttatcgttgatccagatggtattatccaaatgatggaaattaatgctgatggtattggacgtgacgctagcaccttgattgataaaattcacgctgcccaatacgtccgtaaacatccaggtgaagtttgtccagctaaatggaaagaaggcgctgaaactttgacaccaagtcttgatttagttggtaaaatttaa

SEQ ID NO: 126 - protein, 186 aa, Streptococcus pyogenes
MSLIGKEIAEFSAQAYHDGKFITVTNEDVKGKWAVFCFYPADFSFVCPTELGDLQEQYETLKSLGVEVYSVSTDTHFVHKAWHDDSDVVGTITYPMIGDPSHLISQAFEVLGEDGLAQRGTFIVDPDGIIQMMEINADGIGRDASTLIDKIHAAQYVRKHPGEVCPAKWKEGAETLTPSLDLVGKI

SEQ ID NO: 127 - DNA, 2445 bp, Streptococcus pyogenes
atgattatgtattcaacgaagatgcaagacatttttagacaggcgcagttccaagctgctcgctttgatagccattgcctggaaacttggcatgttttgttagctatggtagctgtagataattctttagcaaatatgattttaagtgaatatgatgcccaagtcgccatagaagaatatgaagctgcagctattttagccatgggcaaaacccctaaagaacagttgtctcgtgtagacttcagacctcaatctaaaactttgactaacttgttagcttttgcgcaggctattagccaaatcactagggatcaagaagtcggctctgagcatgtcttatttgctattttattgaatccagatattatggcgagtcgtttgttagaaatagctggctatcagataaaagataacggcaatgggcagccgcgattagctgacttgcgaaaagcaatagaacgtcatgcaggttacagtaaggaaatgatcaaggctattcacgaactacgtaagcctaaaaaaacgaaaacacaagggaccttttcagatatgatgaagccaccaagtacagctggtgagttgagtgatttcacaagagatttgactgaaatggcaagacaaggtttgttagaatcggtgattggacgtgaccaagaagtatctcgtatgattcaggtactaagtcgtaaaacgaaaaacaatcctgtcttggtaggtgatgcaggtgttggtaaaactgcgcttgcttatggccttgctcaacggattgcaaatggcgctattccttatgaacttaaggagatgcgtgtcctagaattagacatgatgagtgtggtagcaggaacccgttttcgtggggattttgaagagcgcatgaatcaaatcattgatgatattgaagctgatggtcagattattctttttgttgatgaactacatactattatgggttctggcagtggtattgacagtacacttgatgcggctaacattttaaaaccagcattatcgcgcggcactcttcatatggttggagcaacaactcaagaagaataccaaaaacatattgaaaaagatgcagctctttcgcgtcgttttgctaaaatattaattgaagaacctaatacagaagatgcttatcagattttgatgggcctaaaattatcttatgagacctaccataatgtctcgatatcaaatgaggcagttaaaacagctgtaaaaatggcacaccgttatttaaccagtaaaaatctccctgattcagctatcgatttactagatgaagctagtgctgctgtgcaaaacatggtgaaaaaatcagcacctgagactttaacaccaatagaccaagctcttatcaatggtgatatgaaaaaagtatctcgcctcttagctaaagaagcaaaaggtcagatgagaaaaccaacaccggtgacagaagatgatattttggcaaccttgagtaagttatcgggaattccacttgaaaaactgacgcaagctgatagtaaaaaatacctcaatttagaaaaagaactgcataagcgtgtgattggtcaggatgctgctgttacggctatttcaagagccattcgtcgtaatcagtcaggtattcgaacaggaaaacgtcctattggatcatttatgtttcttggcccaacaggagtaggtaagacagaactagcaaaggcccttgcagaagttctctttgatgatgaagcagcgcttattcgttttgatatgtctgagtacatggaaaaattcgcagcgtctaggcttaatggagcacctcctggttatgtcggctatgatgaaggaggtgaactgacacagaaagttagaaataaaccttattcagtcttgctttttgatgaagtggaaaaagcacatcctgatatttttaacgttctccttcaagtattagatgatggtatattgactgatagtcgtgggcgtaaggtcgatttttcaaatactattattatcatgaccagcaatcttggcgcaacagccctgcgcgatgataaaacggtcggttttggggtcaaagacattcaccaagaccatcaagctatggagaaacgtattttagaagaattaagaaaaacttaccgcccagaatttatcaatcgtattgatgaaaaagtggtctttcatagtctgacccaagataacatgcgcgatgtggttaaaatcatggtacagcccctgattactacattggcagaaaaaggtattacccttaaaattcagcctttggccttgaaacatttgtccgaggtcggctatgatgagcatatgggggcaagaccattacgtcgaacgctgcaaactgagatagaagataagctatcagagcttattctttctcgagaattgacaagtgggcatacgctaaaaattggattatcacatggcaaattaacgtttcacatagcttaa

SEQ ID NO: 128 - protein, 814 aa, Streptococcus pyogenes
MIMYSTKMQDIFRQAQFQAARFDSHCLETWHVLLAMVAVDNSLANMILSEYDAQVAIEEYEAAAILAMGKTPKEQLSRVDFRPQSKTLTNLLAFAQAISQITRDQEVGSEHVLFAILLNPDIMASRLLEIAGYQIKDNGNGQPRLADLRKAIERHAGYSKEMIKAIHELRKPKKTKTQGTFSDMMKPPSTAGELSDFTRDLTEMARQGLLESVIGRDQEVSRMIQVLSRKTKNNPVLVGDAGVGKTALAYGLAQRIANGAIPYELKEMRVLELDMMSVVAGTRFRGDFEERMNQIIDDIEADGQIILFVDELHTIMGSGSGIDSTLDAANILKPALSRGTLHMVGATTQEEYQKHIEKDAALSRRFAKILIEEPNTEDAYQILMGLKLSYETYHNVSISNEAVKTAVKMAHRYLTSKNLPDSAIDLLDEASAAVQNMVKKSAPETLTPIDQALINGDMKKVSRLLAKEAKGQMRKPTPVTEDDILATLSKLSGIPLEKLTQADSKKYLNLEKELHKRVIGQDAAVTAISRAIRRNQSGIRTGKRPIGSFMFLGPTGVGKTELAKALAEVLFDDEAALIRFDMSEYMEKFAASRLNGAPPGYVGYDEGGELTQKVRNKPYSVLLFDEVEKAHPDIFNVLLQVLDDGILTDSRGRKVDFSNTIIIMTSNLGATALRDDKTVGFGVKDIHQDHQAMEKRILEELRKTYRPEFINRIDEKVVFHSLTQDNMRDVVKIMVQPLITTLAEKGITLKIQPLALKHLSEVGYDEHMGARPLRRTLQTEIEDKLSELILSRELTSGHTLKIGLSHGKLTFHIA

SEQ ID NO: 129 - DNA, 1725 bp, Streptococcus pyogenes
gtgaactatctaggtttcttcgaaaatccattagccatttatgatataatagtaaagaaaaacatagaaagttggggtctgttgatgaccaaaccatttcatcataagaaactaaaacaaataactataatagctgcaactagcctttttttattcctgatcggtggtgccttttactactctaaaaatcattgtattaatgcctatcttaaagctcgatcggcccaatcaggaccagtttttgagaatatcaaagcatatctagtctgggatgatactaatgagcagatcacaaatgacgaggcgatgtatactaagtttagaaggtatagtcagaaagaattgaggcaaaaaaagcaggatttaaaagccgctagtcaagatagtgccgttcaagtaaagtctgttggtcgtcgtttttggatttttcctgattatcggattgccataaaacccatggatttaacgataaaaacgaatgtgcctcaagcagacgttcttttaaatcaaaaaaaagttgctgtttctgattcagaacagttctcagtcaagcttgatcggctaccaacggcagaatataccgcaagtatcagaggcaaacacaacgggcgaaacattaaagtcaacaaatcatatgatggtgataatcccgtgctagatttgagtgtgtcttttagaacttttttggtaacaagcaatgctaagcaaggagatctttacttcgatgataaccatattggcacattaaaagatggtcaattacaagtagaagattaccctgttacagaaaacgcacaagcttatatgaaaacaacattcccagatggtgagttaagatcacaaaaatatgctctagctgatgttgaagaaggagcaaccctggagattttagttacagatcttttagaagaggacaaggcaggggagctattagtatcagcttttgatcagctgatgcactacctcagtacaggtcaagactcatctaacttacgtagcgtctttgaggcagggtctagcaacgcattttataggggattgaaagagtccataaaagcgaaatttcagacagatacaagaaaagccagccgtctcaatattccatctatccttttgacaacaatgactcaagtgggtaaaacaacttacgtgcttgatttcacagctacctacgaatttttgtatgacaagtcaacagatcctgagcagcatacctctggacatattaatcaagacttgactggaaaagtgactgtaaaaaaagttggacagcattaccttatcagccagtccggctccaaaaatattactgttgttaaagaggacaatcaactcaaagcgccatctgtctttcctgagtctattttgggaacgtggacaggccaagccaatggtttgagcatccatatgtctctagcatcagatggaacaattacgactaaagttgaagatcaaaaaggcaaccgttctaaagaaactcggacagctaaaattagtaaagttgaagacaaaggcaatggtttttatctttatacgccagatcctggaagtgacataagcgccttagttccagaaggaggattggggggtgcaaatgtcaaatatgcttatggtttcaaaatatctggtaaaacagcctctccagtggtgtggcaggcagcattaacacatgaatttgattataccaagccactttcgggagtaactttgcaaaagcaaccataa

SEQ ID NO: 130 - protein, 574 aa, Streptococcus pyogenes
MNYLGFFENPLAIYDIIVKKNIESWGLLMTKPFHHKKLKQITIIAATSLFLFLIGGAFYYSKNHCINAYLKARSAQSGPVFENIKAYLVWDDTNEQITNDEAMYTKFRRYSQKELRQKKQDLKAASQDSAVQVKSVGRRFWIFPDYRIAIKPMDLTIKTNVPQADVLLNQKKVAVSDSEQFSVKLDRLPTAEYTASIRGKHNGRNIKVNKSYDGDNPVLDLSVSFRTFLVTSNAKQGDLYFDDNHIGTLKDGQLQVEDYPVTENAQAYMKTTFPDGELRSQKYALADVEEGATLEILVTDLLEEDKAGELLVSAFDQLMHYLSTGQDSSNLRSVFEAGSSNAFYRGLKESIKAKFQTDTRKASRLNIPSILLTTMTQVGKTTYVLDFTATYEFLYDKSTDPEQHTSGHINQDLTGKVTVKKVGQHYLISQSGSKNITVVKEDNQLKAPSVFPESILGTWTGQANGLSIHMSLASDGTITTKVEDQKGNRSKETRTAKISKVEDKGNGFYLYTPDPGSDISALVPEGGLGGANVKYAYGFKISGKTASPVVWQAALTHEFDYTKPLSGVTLQKQP

SEQ ID NO: 131 - DNA, 954 bp, Streptococcus pyogenes
atgagaaaagaggctcaaaaggacatgaaacaaatgaataaactcattacaggagtggtaacgctggcgacagtcgtgaccttatcagcttgtcaatcatcacacaacaacaccaaactcgtctcgatgaaaggagacaccatcactgtcagtgacttctacaatgagaccaaaaacacagaactcgcacaaaaagccatgttaagcttggtgattagccgcgtttttgagacacaatatgccaacaaagtctctgacaaagaggttgaaaaagcctataaacaaaccgcagaccaatacggtacatcctttaagacagtcctagcacaatcaggcttaacgccagaaacctataaaaaacaaattcgcctcacaaaattagtcgaatatgccgtcaaagaacaagccaaaaacgaaaccatctcaaaaaaagactaccgtcaggcctatgacgcttataccccaaccatgaccgcagaaatcatgcagtttgaaaaagaagaggatgccaaagcagcgcttgaagccgtcaaagctgaaggggcagactttgcagctattgccaaagaaaaaaccactgcagccgataaaaaaacaacctatacgtttgactcaggcgaaacaaccctaccagcagaagtagttagagctgcatcaggcctcaaagaagggaacagatcagaaatcatcacagcgcttgatccagccacctcaaaacgcacctaccatatcatcaaagtcaccaaaaaagcaactaaaaaagcagactggaaagcgtaccaaaaacgcttgaaagacatcatcgtgactggcaaattaaaagaccctgacttccaaaacaaagtcatcgctaaagctcttgataaagcaaatgtcaaaatcaaagacaaagcatttgccaatatcttagcccagtttgcaaaacctaaccaaaaacaacctgcccaaaaatag

SEQ ID NO: 132 - protein, 317 aa, Streptococcus pyogenes
MRKEAQKDMKQMNKLITGVVTLATVVTLSACQSSHNNTKLVSMKGDTITVSDFYNETKNTELAQKAMLSLVISRVFETQYANKVSDKEVEKAYKQTADQYGTSFKTVLAQSGLTPETYKKQIRLTKLVEYAVKEQAKNETISKKDYRQAYDAYTPTMTAEIMQFEKEEDAKAALEAVKAEGADFAAIAKEKTTAADKKTTYTFDSGETTLPAEVVRAASGLKEGNRSEIITALDPATSKRTYHIIKVTKKATKKADWKAYQKRLKDIIVTGKLKDPDFQNKVIAKALDKANVKIKDKAFANILAQFAKPNQKQPAQK

SEQ ID NO: 133 - DNA, 405 bp, Streptococcus pyogenes
atgacaggacaaaaaaagctagccaatctcaaaaaaacagataaaaaacagataatcgttagaaaaacagtagatgcgtctgttaaactaaaggtatcaaaacaaaaggagcatttcatcatgaaattcaaaaaagtattagtcattcctgcattagcattagcagcaacatgctttttaacagcttgtggcacaaaaaaagattctaaaaaagaagaagttaaagaaatcaaaatgtctgacatcaaagacgacgcagttagcaaaaaaacaaaagtggttgatggcgaagaagttacagaatacaccacaaaagatggaaacgtgattcagattcctgcaggaaacgaagaaggcatggaatcaaaagatgctggtggatcaggcgctcctgctaaaaactaa

SEQ ID NO: 134 - protein, 134 aa, Streptococcus pyogenes
MTGQKKLANLKKTDKKQIIVRKTVDASVKLKVSKQKEHFIMKFKKVLVIPALALAATCFLTACGTKKDSKKEEVKEIKMSDIKDDAVSKKTKVVDGEEVTEYTTKDGNVIQIPAGNEEGMESKDAGGSGAPAKN

SEQ ID NO: 135 - DNA, 1269 bp, Streptococcus pyogenes
atgtttcagttaagaaaaaaaatgacgcgcaaacaattagccttgttgagtgctggagtgttgacctgtgtggttggtggtagctacttgataatgaaccatcaacaacaagaaattgtctctagtgtcaacaaagtaaaagccttaaccataaaagaagccatggaacaaggaaaagatatcagcttgaccttagctggcgaagtaacagctaacaacagcagcaaagtcaaaatcgactcaagtaaaggagaagtcaaagaggtctttgttaaaaaaggcgatgttgtcaaagtaggacaacccttgtttagctatgaaacgtcacagcggttaacggctcaaagttcagaatttgatgttcaaaccaaagccaatcagctccaagttgctaaaaccaatgcagcattgaagtgggaaacctacaatcgcaaggtcaatgaaatcaacaccctaaaatctcgctacaacactgcaccagatgagagcttactagagcaaattcgcagcgcagaagacagtgtatcccaagcactaagcgatgccaaaacagcagatagcgatgtcaaaaccgctcaaatcgaactcgataaagctaatgctactgccacaacggaaaaaggtaaactagagtatgacaccgttaagtcagacaccgcaggaaccattgttagtctaaatactgatttgccaaatcaatcaaaatccaaaaaagaaaatgaaacttttatggaaattatcgacaaatcaaaaatgttagtcaaaggtaacattagtgaatttgaccgtgacaagttaaaaatcggtcaaaaagtcgaagtgattgaccgcaaagacaactctaaaaaatggactggaaaagtaacccaagttggcaacctcaaagcagaggaaaaaggccaaggtcaaggccaaggtggcaatgaccaacaagataatccaaaccaagcaaaattcccttatgttattgaacttgaccaatcagacaagcagccactcattggctcacacacctatgttaatgtgctcaacaatgttccagaagctggcaagatcgtattgaaagaaacctttacaatggcagaaaatggaaaaacctatgtgtggaaagttgataaaaacaaggtcaaaaaacaagaaatcaagactaagcccttctcaaaaggttatgttgaggtaacaagtggcttgactatgcaagataagattgctcagccgcttcctggcatgaaagacggtatggaggtaggaagtattgttaaaccttaa

SEQ ID NO: 136 - protein, 422 aa, Streptococcus pyogenes
MFQLRKKMTRKQLALLSAGVLTCVVGGSYLIMNHQQQEIVSSVNKVKALTIKEAMEQGKDISLTLAGEVTANNSSKVKIDSSKGEVKEVFVKKGDVVKVGQPLFSYETSQRLTAQSSEFDVQTKANQLQVAKTNAALKWETYNRKVNEINTLKSRYNTAPDESLLEQIRSAEDSVSQALSDAKTADSDVKTAQIELDKANATATTEKGKLEYDTVKSDTAGTIVSLNTDLPNQSKSKKENETFMEIIDKSKMLVKGNISEFDRDKLKIGQKVEVIDRKDNSKKWTGKVTQVGNLKAEEKGQGQGQGGNDQQDNPNQAKFPYVIELDQSDKQPLIGSHTYVNVLNNVPEAGKIVLKETFTMAENGKTYVWKVDKNKVKKQEIKTKPFSKGYVEVTSGLTMQDKIAQPLPGMKDGMEVGSIVKP

SEQ ID NO: 137 - DNA, 1140 bp, Streptococcus pyogenes
atgcgtagagcagaaaataacaaacacagccgctattccattcgcaaactgagcgttggggtaacgagtatagcaattgcgagtctctttttaggaaaggttgcctatgccgtagatggcatccctccaatctctcttactcaaaagactacagccactacatcagaaaattggcatcatattgataaggatggccttattcctttaggtataagcttagaagctgccaaagaggaatttaaaaaagaagtagaagaatcacgtttatctgaagcacaaaaagaaacgtataaacaaaaaattaaaactgcaccagacaaagataagctattattcacgtatcatagtgagtatatgacagccgttaaggatcttccagcgtctactgagtctactactcagccagttgaggcacccgtgcaggagacacaggcatcagcttcagattcgatggtgacaggtgattcaacatcagttacgactgattctcctgaggaaaccccatcttcggaaagtccagtggccccagctttatctgaggctccagctcaaccagctgagagtgaggaaccttcagtagcagcatcttctgaggaaaccccatctccatcaactccagcggccccagaaactcctgaagaaccagcagctccatctccatcacctgagagtgaggaaccttcagtagcagctccttctgaggaaaccccatctccagaaactcctgaagaaccagcagctccatctcaaccagctgagagtgaagaatcttcagtagcagctacgacaagcccgtctccatcaactccagctgaatcagagactcagacgccaccagctgttactaaagactctgataagccatcttcagcagctgaaaaaccagcagcctcttcacttgtttcagaacaaaccgttcaacaaccaacttcaaagagatcttctgataaaaaagaagagcaagaacagtcttactctccaaatcgctcattgtcaagacaggttagggcccatgagtcaggtaagtacttgccttcaacaggtgaaaaagcacagccactctttatagctactatgactttgatgtctctatttggcagtcttttagtcacaaaacgccaaaaagaaactaaaaaatag

SEQ ID NO: 138 - protein, 379 aa, Streptococcus pyogenes
MRRAENNKHSRYSIRKLSVGVTSIAIASLFLGKVAYAVDGIPPISLTQKTTATTSENWHHIDKDGLIPLGISLEAAKEEFKKEVEESRLSEAQKETYKQKIKTAPDKDKLLFTYHSEYMTAVKDLPASTESTTQPVEAPVQETQASASDSMVTGDSTSVTTDSPEETPSSESPVAPALSEAPAQPAESEEPSVAASSEETPSPSTPAAPETPEEPAAPSPSPESEEPSVAAPSEETPSPETPEEPAAPSQPAESEESSVAATTSPSPSTPAESETQTPPAVTKDSDKPSSAAEKPAASSLVSEQTVQQPTSKRSSDKKEEQEQSYSPNRSLSRQVRAHESGKYLPSTGEKAQPLFIATMTLMSLFGSLLVTKRQKETKK

SEQ ID NO: 139 - DNA, 1635 bp, Streptococcus pyogenes
ttgattgtgtcaaaatacctaaaatacttctctattatcacgttatttttgactgggcttattttagttgcatgtcaacaacaaaagcctcaaacaaaagaacgtcagcgcaaacaacgtccaaaagacgaacttgtcgtttctatgggggcaaagctccctcatgaattcgatccaaaggaccgttatggagtccacaatgaagggaatatcactcatagcactctattgaaacgttctcctgaactagatataaaaggagagcttgctaaaacataccatctctctgaagatgggctgacttggtcgtttgacttgcatgatgattttaaattctcaaatggtgagcctgttactgctgatgatgttaagtttacttatgatatgttgaaagcagatggaaaggcttgggatctaaccttcattaagaacgttgaagtagttgggaaaaatcaggtcaatatccatttgactgaggcgcattcgacatttacagcacagttgactgaaatcccaatcgtccctaaaaaacattacaatgataagtataagagcaatcctatcggttcaggaccttacatggtaaaagaatataaggctggagaacaagctatttttgttcgtaacccttattggcatgggaaaaaaccatactttaaaaaatggacttgggtcttacttgatgaaaacacagcactagcagctttagaatctggtgatgttgatatgatctacgcaacgccagaacttgctgataaaaaagtcaaaggcacccgcctccttgatattccatcaaatgatgtgcgcggcttatcattaccttatgtgaaaaagggcgtcatcactgattctcctgatggttatcctgtaggaaatgatgtcactagtgatccagcaatccgaaaagccttgactattggtttaaataggcaaaaagttctcgatacggttttaaatggttatggtaaaccagcttattcaattattgataaaacaccattttggaatccaaaaacagccattaaagataataaagtagctaaagctaagcaattattgacaaaagcgggatggaaagaacaagcagacggtagccgtaaaaaaggtgaccttgatgcagcgtttgatctgtactaccctactaatgatcaattgcgagcgaacttagccgttgaagtagcagagcaagccaaggccctagggattactattaaactcaaagctagtaactgggatgaaatggcaacgaagtcacatgactcagccttactttatgccggaggacgtcatcacgcgcagcaattttatgaatcgcatcatccaagcctagcagggaaaggttggaccaatattacgttttataacaatcctaccgtgactaagtaccttgacaaagcaatgacatcttctgaccttgataaagctaacgaatattggaagttagcgcagtgggatggcaaaacaggtgcttctactcttggagatttgccaaatgtatggttggtgagccttaaccatacttatattggtgataaacgtatcaatgtaggtaaacaaggcgtccacagtcatggtcatgattggtcattattgactaacattgccgagtggacttgggatgaatcaactaagtaa

SEQ ID NO: 140 - protein, 544 aa, Streptococcus pyogenes
MIVSKYLKYFSIITLFLTGLILVACQQQKPQTKERQRKQRPKDELVVSMGAKLPHEFDPKDRYGVHNEGNITHSTLLKRSPELDIKGELAKTYHLSEDGLTWSFDLHDDFKFSNGEPVTADDVKFTYDMLKADGKAWDLTFIKNVEVVGKNQVNIHLTEAHSTFTAQLTEIPIVPKKHYNDKYKSNPIGSGPYMVKEYKAGEQAIFVRNPYWHGKKPYFKKWTWVLLDENTALAALESGDVDMIYATPELADKKVKGTRLLDIPSNDVRGLSLPYVKKGVITDSPDGYPVGNDVTSDPAIRKALTIGLNRQKVLDTVLNGYGKPAYSIIDKTPFWNPKTAIKDNKVAKAKQLLTKAGWKEQADGSRKKGDLDAAFDLYYPTNDQLRANLAVEVAEQAKALGITIKLKASNWDEMATKSHDSALLYAGGRHHAQQFYESHHPSLAGKGWTNITFYNNPTVTKYLDKAMTSSDLDKANEYWKLAQWDGKTGASTLGDLPNVWLVSLNHTYIGDKRINVGKQGVHSHGHDWSLLTNIAEWTWDESTK

SEQ ID NO: 141 - DNA, 1047 bp, Streptococcus pyogenes
atgttgacatcaaagcaccataatctcaacaaactagtctggcgctacgggctaacctcagccgctgccgtccttctagcctttggaggcggggcaagcagcgttaaggctgaggtttcttctacgactatgacgtcgagtcaaagagagtcaaaaataaaagagatcgaagaaagtcttaaaaaatatccagaagtgtccaatgagaaattttgggaaagaaagtggtatggaacctattttaaagaagaagattttcaaaaggagctaaaagattttactgagaagaggcttaaggagattctagatttaattggtaaatctggaatcaagggagaccgtggtgagactggtcctgctggcccagccggaccacaaggtaaaactggtgagaggggcgcccaaggtcctaaaggtgaccgcggtgagcaaggaatccaaggtaaagctggtgaaaaaggtgagcgcggtgaaaaaggcgacaaaggtgaaaccggtgaacgcggtgaaaaaggcgaagctggaatccaaggcccacaaggtgaagctggtaaagatggcgctccaggtaaagatggagctccaggcgaaaagggtgaaaaaggtgaccgcggtgaaaccggagctcagggtccagtaggcccacaaggtgaaaaaggtgaaacgggcgcccaaggcccagcaggcccacaaggtgaggcaggcaaaccaggtgagcaaggcccagcaggcccacaaggtgaagcaggccaaccaggcgaaaaagctccagaaaagagcccagaaggcgaagcaggccaaccaggcgaaaaagctccagaaaagagcaaagaggtaactccagctgcagaaaaacctgctgacaaagaagctaaccaaacgccagaacgccgcaatggcaatatggctaagacacctgtagccaacaaccacagacgtctaccagcaactggtgagcaagccaacccattctttacagcagcagcagtagcagtgatgacaacagctggtgtcctagccgttacaaaacgcaaagaaaacaactaa

SEQ ID NO: 142 - protein, 348 aa, Streptococcus pyogenes
MLTSKHHNLNKLVWRYGLTSAAAVLLAFGGGASSVKAEVSSTTMTSSQRESKIKEIEESLKKYPEVSNEKFWERKWYGTYFKEEDFQKELKDFTEKRLKEILDLIGKSGIKGDRGETGPAGPAGPQGKTGERGAQGPKGDRGEQGIQGKAGEKGERGEKGDKGETGERGEKGEAGIQGPQGEAGKDGAPGKDGAPGEKGEKGDRGETGAQGPVGPQGEKGETGAQGPAGPQGEAGKPGEQGPAGPQGEAGQPGEKAPEKSPEGEAGQPGEKAPEKSKEVTPAAEKPADKEANQTPERRNGNMAKTPVANNHRRLPATGEQANPFFTAAAVAVMTTAGVLAVTKRKENN

SEQ ID NO: 143 - DNA, 1371 bp, Streptococcus pyogenes
ttgatttcacgcataaaaagctttaaaaacgctttaaattatgataaaatgaactgtatcgaaattattttaaggagaaatgacttaatgtctacatcatttgaaaacaaagctacaaatcgtggcgtgattacatttacaatcagtcaagataaaataaaaccagctcttgataaagcttttaataaaatcaaaaaagacttgaatgcaccaggtttccgtaaaggacacatgcctcgtccagtcttcaaccaaaaatttggtgaagaagttctttatgaagatgctttgaatattgtattgccagaagcttatgaagcagctgtgacggaacttggtcttgatgtggttgcacaaccaaaaatcgatgttgtgtcaatggaaaaagggaaagagtggacactttctgctgaagttgtgacaaaacctgaagtgaaacttggtgattacaaaaacctagttgtagaagttgatgcttcaaaagaagtttcagatgaagacgtggatgctaaaattgagcgcgaacgtcaaaaccttgcggaactcattattaaagacggtgaagcagctcaaggtgacactgttgtgattgactttgttggttcagttgatggtgttgagtttgatggcggtaaaggagataacttctctcttgaacttggttcaggacaatttatcccaggttttgaagatcaactagttggtgctaaagctggcgatgaagtagaagttaatgtcacattcccagaatcttaccaagcagaagatcttgcaggtaaagccgctaaatttatgacaactattcacgaagtcaaaacaaaagaagtaccagagcttgatgatgagcttgcaaaagatattgatgaagatgttgacacacttgaagacttaaaagtaaaatatcgtaaagaacttgaagcagctcaagaaactgcttatgatgatgctgttgaaggagctgcgattgaattagcagttgcaaatgctgaaattgttgatttacccgaagaaatgattcatgaagaagtcaaccgttcagtgaatgaatttatgggcaacatgcaacgtcaaggaatctcacctgaaatgtacttccaattgactggtacaactcaagaagatttacataaccaatattcagctgaagctgacaaacgtgttaaaacacaccttgttattgaagcaattgctaaagcagaaggttttgaagcaacagatagtgaaattgaacaagaaattaatgaccttgcaacagaatataacatgccagctgaccaagttcgttctcttctttcagcagatatgttgaaacatgatattgcaatgaaaaaagcagttgaagtgattacaagcacagcaagcgttaagtaa

SEQ ID NO: 144 - protein, 456 aa, Streptococcus pyogenes
MISRIKSFKNALNYDKMNCIEIILRRNDLMSTSFENKATNRGVITFTISQDKIKPALDKAFNKIKKDLNAPGFRKGHMPRPVFNQKFGEEVLYEDALNIVLPEAYEAAVTELGLDVVAQPKIDVVSMEKGKEWTLSAEVVTKPEVKLGDYKNLVVEVDASKEVSDEDVDAKIERERQNLAELIIKDGEAAQGDTVVIDFVGSVDGVEFDGGKGDNFSLELGSGQFIPGFEDQLVGAKAGDEVEVNVTFPESYQAEDLAGKAAKFMTTIHEVKTKEVPELDDELAKDIDEDVDTLEDLKVKYRKELEAAQETAYDDAVEGAAIELAVANAEIVDLPEEMIHEEVNRSVNEFMGNMQRQGISPEMYFQLTGTTQEDLHNQYSAEADKRVKTHLVIEAIAKAEGFEATDSEIEQEINDLATEYNMPADQVRSLLSADMLKHDIAMKKAVEVITSTASVK

SEQ ID NO: 145 - DNA, 927 bp, Streptococcus pyogenes
atgaaaactattcgaatagcaaagtatttaggaattctattccttttgataactcttattagcgtaggtgctagtttttatttctttcatgttgcacaaataagagaagagaaatcgtttattaataataagaaacggagtacaaataatccattatacccagctgaacagtcttttgacgctttaccttacgaaaaacgtcaactaacaaatcgtgggttaaaacaagtggggtggtacttaccagctgctcaaaaaacaaaaaagacagctattgttgttcatggttttacgaatgacaaagaagatatgaagccatatgccatgctttttcatgatttgggctataatgtcttaatgccagacaatgaggcccatggggaaagtgaagggaacttgattggttatggctggaatgaccgccttaatgtcatggcttggacagaccaactgattaaggaaaaccctgaaagccaaatcacactctttggcttatctatgggtgctgcaacagtaatgatggcaagtggtgagcgattgcctgcgcaagtcacctccctcatcgaagattgcggttatgccagtgtttgggacgaattgaagtttcaggccaaggctatgtacaacttgcctgcctttcctttactctatgaagtctctgccttatctaagattcgagcaggttttagttacggagaagcgagctcagtgaaacagctggctaaaaataaacgtccaactttatttatccacggtgataaggatgattttgttcctacaaaaatggtttatgacaattataaggccacgaaaggtcctaaggaaatcttgattgttaaaggggcaaaacacgccaaatcctttgaaacaaacccagaacaataccagaaaaaaattgccgcttttttgaaaaaagttgagaaataa

SEQ ID NO: 146 - protein, 308 aa, Streptococcus pyogenes
MKTIRIAKYLGILFLLITLISVGASFYFFHVAQIREEKSFINNKKRSTNNPLYPAEQSFDALPYEKRQLTNRGLKQVGWYLPAAQKTKKTAIVVHGFTNDKEDMKPYAMLFHDLGYNVLMPDNEAHGESEGNLIGYGWNDRLNVMAWTDQLIKENPESQITLFGLSMGAATVMMASGERLPAQVTSLIEDCGYASVWDELKFQAKAMYNLPAFPLLYEVSALSKIRAGFSYGEASSVKQLAKNKRPTLFIHGDKDDFVPTKMVYDNYKATKGPKEILIVKGAKHAKSFETNPEQYQKKIAAFLKKVEK

SEQ ID NO: 147 - DNA, 855 bp, Streptococcus pyogenes
atgaaatccaaaaaagttgttagtgttatatcacttaccttatccctttttttggtgacaggttgtgctaaagttgataacaacaaatcagttaatcttaagcctgctactaaacaaacctataatagctatagtgatgaccaattaagatcgcgtgaaaataccatgtctgttttatggtaccagcgagctgcggaaactcaagcgctttatttacaggggtatcagttagcaacggatcgcttaaaagaacaactcaataaaccaacggataaaccttattcaattgtattagatattgacgaaacagttcttgataatagcccttatcaagctaaaaatgttttggaaggaacaggatttacacctgaaagctgggattattgggtacaaaagaaagaagcaaaaccggttgctggtgctaaagactttttgcaatttgcagaccaaaatggtgttcaaatttactacatttcagacagatcaactactcaagtagatgctacaatggaaaatctccaaaaagaaggtattccagtacaaggtcgtgatcatcttctattcttagaaaaaggcgtaaaatcaaaggagagtcgtcgtcaaaaggtcaaagaaacaactaatgtaacgatgctatttggtgataatcttctagattttgctgatttttcaaaaaaatctcaagaagatagaacagctttattatcagatttacaagaagagtttggaagacgctttatcattttccctaatcctatgtatggttcatgggaaggtgccatttataaaggtgaaaagctggatgtgcttaagcaactagaggaacgccgtaaaagtttaaaaagctttaaataa

SEQ ID NO: 148 - protein, 284 aa, Streptococcus pyogenes
MKSKKVVSVISLTLSLFLVTGCAKVDNNKSVNLKPATKQTYNSYSDDQLRSRENTMSVLWYQRAAETQALYLQGYQLATDRLKEQLNKPTDKPYSIVLDIDETVLDNSPYQAKNVLEGTGFTPESWDYWVQKKEAKPVAGAKDFLQFADQNGVQIYYISDRSTTQVDATMENLQKEGIPVQGRDHLLFLEKGVKSKESRRQKVKETTNVTMLFGDNLLDFADFSKKSQEDRTALLSDLQEEFGRRFIIFPNPMYGSWEGAIYKGEKLDVLKQLEERRKSLKSFK

SEQ ID NO: 149 - DNA, 918 bp, Streptococcus pyogenes
ttgctgtatgggtttggaaaaagaggaaaaaaaatgataaaacgatgtaaaggaattggtctagccttaatggccttctttttggtagcttgtgtgaatcagcaccctaaaacggctaaagagactgaacagcagagaattgtagccacttcggttgctgtggttgatatctgtgaccgtttaaatttagacctcgttggggtttgtgatagtaaattatatacccttcctaaacgctatgatgctgttaagcgtgtgggtttacccatgaatcctgatatagagttgattgcttctttgaaaccaacttggattttgagtcccaattctttacaagaagatttggaacccaagtatcaaaaattggatactgagtatggttttttgaacttacgaagtgttgagggcatgtaccagtccattgatgatttagggaaccttttccaacgtcaacaagaagcaaaagaattgcgccagcaataccaggactattatcgtgctttccaagctaaacgtaaggggaagaaaaagcctaaagtgcttattcttatgggcttgccaggtagttatttggtggcgacgaaccaatcttatgtagggaatcttttggacttggcaggtggtgagaatgtttatcagtcagatgagaaagaatttctatcagctaatcctgaagacatgctggctaaggagcctgacttgattttacgaacagctcatgccattccagacaaggtaaaagtgatgtttgacaaagaatttgctgaaaatgatatttggaaacattttacggcagtcaaggaagggaaagtctatgatttggacaataccctgtttggcatgagtgctaaattgaactacccagaagccttggacaccttaacacagctttttgaccacgtgggagatcatccgtaa

SEQ ID NO: 150 - protein, 305 aa, Streptococcus pyogenes
MLYGFGKRGKKMIKRCKGIGLALMAFFLVACVNQHPKTAKETEQQRIVATSVAVVDICDRLNLDLVGVCDSKLYTLPKRYDAVKRVGLPMNPDIELIASLKPTWILSPNSLQEDLEPKYQKLDTEYGFLNLRSVEGMYQSIDDLGNLFQRQQEAKELRQQYQDYYRAFQAKRKGKKKPKVLILMGLPGSYLVATNQSYVGNLLDLAGGENVYQSDEKEFLSANPEDMLAKEPDLILRTAHAIPDKVKVMFDKEFAENDIWKHFTAVKEGKVYDLDNTLFGMSAKLNYPEALDTLTQLFDHVGDHP

SEQ ID NO: 151 - DNA, 1143 bp, Streptococcus pyogenes
atgaaaaagtggcaaaaaatcgtgtgtgtgactggaactgtgcttgcaacgtctagtttagcagcctgcgaaagcaagtcagcatcaaaagatagtgatgtcaaattattgatgtaccaagttggtgacaaacctgataacttcgatgaattgatgacaattgctaacaagcgcatcaaagaaaaaacaggtgcaacggttgaccttcaatacatcggttggggggactgggatgataaaatgagtaccatcattgcctctggtgaaaactacgacattgcttttgccaataattatgtggtcaatgcacaaaaaggtgcttttgctgatttgacaacgttaatgccaaaatacgctaagaaaacgtataaaaacttagacccagcctatattaaaggaaatactattgacggtaaactctatgccttcccagtagatgccaacgtttatgcccaacagatgctttctttcaataaagaactagtggacaaatatggccttgacatttcaaacattaagtcctatgcagatgctgaaaatgtcttgaaacaattccacgaaaaagaaccaaatacagcagcttttgctattggtcaagtctttagtatgtcaggtgactatgactacccattaaccaaaacccaaccctttgctgtgaaaattgatgaaggcaagccaaccatcattaatcagtatgaagatgagtcctttaaaaacaatctccgcttgatgcacaaatggtataaagaaggtttgattccaacagatgcagcgaccaatacagaaggttatccccttgaaggaaacacttggtttatgcgtgaagaaacccaaggtcctatggactatggcgatactatcttgaccaatgctgcaggaaaagacatcgtgtctcgtccattgactaaaccgctaaaaaccacatcacaagcacaaatggcaaactttgtggtatcaagcgtatctaaaaacaaagaaaaagcagttgaagtcctttctcttcttaatagcgatcccgaattgttaaatgggcttgtttatggtgtcgaaggcaaagcttgggaaaaaattggcgacaagaaaatcaaactgctcgatggctatcaacctaaaaatgcacatgggtgcttggaatactggtaa

SEQ ID NO: 152 - protein, 380 aa, Streptococcus pyogenes
MKKWQKIVCVTGTVLATSSLAACESKSASKDSDVKLLMYQVGDKPDNFDELMTIANKRIKEKTGATVDLQYIGWGDWDDKMSTIIASGENYDIAFANNYVVNAQKGAFADLTTLMPKYAKKTYKNLDPAYIKGNTIDGKLYAFPVDANVYAQQMLSFNKELVDKYGLDISNIKSYADAENVLKQFHEKEPNTAAFAIGQVFSMSGDYDYPLTKTQPFAVKIDEGKPTIINQYEDESFKNNLRLMHKWYKEGLIPTDAATNTEGYPLEGNTWFMREETQGPMDYGDTILTNAAGKDIVSRPLTKPLKTTSQAQMANFVVSSVSKNKEKAVEVLSLLNSDPELLNGLVYGVEGKAWEKIGDKKIKLLDGYQPKNAHGCLEYW

SEQ ID NO: 153 - DNA, 624 bp, Streptococcus pyogenes
atgaaaaaaggactattagtaacaactggtttggcttgtctcgggctactaactgcttgctcaacccaagacaatatggctaaaaaggaaataactcaggacaagatgagcatggcagctaaaaagaaagataagatgtcaacatcaaaggacaagtccatgatggcagataaatcatctgataagaaaatgaccaatgatggtcctatggcgcctgatttcgaactcaaaggcatcgatggtaagacctatcgcttatcagagttcaaaggtaaaaaagtttatttgaaattttgggcctcttggtgttcaatctgtctatcaaccttggcagataccgaagacctggctaaaatgtcagataaagactatgtggtcctaacagttgtctcgccaggtcatcaaggggaaaaatcagaagcagactttaaaaaatggttccaaggaacagactataaggacttaccagtcttgttagatccggatggcaagctattggaagcttacggtgtcagatcttacccaacagaagttttcattggaagtgatggtgttcttgctaaaaaacacattggttatgccaaaaaatcagacatcaaaaagacccttaaaggtatacattag

SEQ ID NO: 154 - protein, 207 aa, Streptococcus pyogenes
MKKGLLVTTGLACLGLLTACSTQDNMAKKEITQDKMSMAAKKKDKMSTSKDKSMMADKSSDKKMTNDGPMAPDFELKGIDGKTYRLSEFKGKKVYLKFWASWCSICLSTLADTEDLAKMSDKDYVVLTVVSPGHQGEKSEADFKKWFQGTDYKDLPVLLDPDGKLLEAYGVRSYPTEVFIGSDGVLAKKHIGYAKKSDIKKTLKGIH

SEQ ID NO: 155 - DNA, 228 bp, Streptococcus pyogenes
gtgttaagaaagaagaaaactaccattgtagggattattttaggaatgatgatagtgaccttacttgtcggctgtttgactggtaaaaagaaaggctttcctcctaaagcaggtgagcggcagcaaacggctgacttaaaaatgaaaaaaagattagaaaaactgttcaaaaaccgttacctgaaaaatctaaagaggctaagcaagctgttatggatgcagatttag

SEQ ID NO: 156 - protein, 75 aa, Streptococcus pyogenes
MLRKKKTTIVGIILGMMIVTLLVGCLTGKKKGFPPKAGERQQTADLKMKKRLEKLFKNRYLKNLKRLSKLLWMQI

SEQ ID NO: 157 - DNA, 1032 bp, Streptococcus pyogenes
atgaaaacgaaaaaagttattattttagttggtctattgttatcatctcagttgactttgatagcttgtcaatcacgaggtaatggtacatatcccattaaaacgaaacaatcacgtaagggaatgacgtcaaacaaaattaaaccgattaaaaaaagcaaaaagacaaacaagactcacaaaggtgtggcgggtgtcgattttcctacagatgatgggtttattttaaccaaagactcaaaaatcttatcaaaaacagatcagggaatcgttgttgaccatgatggtcattcgcattttattttttatgccgatttaaagggaagtccatttgaataccttattccaaaaggagcaagtttagctaagccagctgttgctcagcgagcagctagtcaagggacttctaaagtagcagatcctcatcaccattatgaatttaacccagcggatattgtggctgaagatgctttaggctacacggttcgccacgatgatcacttccattatattttgaagtcaagcttatcaggtcagacacaggcacaagctaaacaggttgctactcgcttgccacaaaccagtagccttgtttcaacagctacagctaatggtattccaggcttgcatttcccaacctcagatggttttcaatttaacggtcaaggtattgttggggtaacaaaagacagtattttagtggaccacgatggtcacttacatcctatttcttttgcggaccttcgtcagggtggctgggcacatgtggcagatcaatacgatcccgctaaaaaagcagaaaagccagcagaaacccatcagacaccagagctatctgaacgtgaaaaggaataccaagaaaaattagcttatttggcagaaaaattggggattgatccatcaactattaaacgtgtggaaacacaagacggtaaacttggtttggaataccctcaccatgaccacgcacacgtattgatgttatctgaaattgaaatcgggaaaagacattccagatccacatgctattga

SEQ ID NO: 158 - protein, 343 aa, Streptococcus pyogenes
MKTKKVIILVGLLLSSQLTLIACQSRGNGTYPIKTKQSRKGMTSNKIKPIKKSKKTNKTHKGVAGVDFPTDDGFILTKDSKILSKTDQGIVVDHDGHSHFIFYADLKGSPFEYLIPKGASLAKPAVAQRAASQGTSKVADPHHHYEFNPADIVAEDALGYTVRHDDHFHYILKSSLSGQTQAQAKQVATRLPQTSSLVSTATANGIPGLHFPTSDGFQFNGQGIVGVTKDSILVDHDGHLHPISFADLRQGGWAHVADQYDPAKKAEKPAETHQTPELSEREKEYQEKLAYLAEKLGIDPSTIKRVETQDGKLGLEYPHHDHAHVLMLSEIEIGKRHSRSTCY

SEQ ID NO: 159 - DNA, 300 bp, Streptococcus pyogenes
atgtcatggaattggaaaaaaacatctgtgcttggaactttatccttagcttcagtgctacccctaactgcttgcgtaagtggtggtggtaaaggcgttaaggaaacagacggaaagactattgtagtctctgttgatgagggatatgttgattacattaagagtattaagggtgagtttgaaaaagaacataaagtcaccgttaaagtcaaaaaagaaggtatgatggatactcttgataagctatcaacggatggtccaacaggagcttcaccagatgtctttttagcacctttttga

SEQ ID NO: 160 - protein, 99 aa, Streptococcus pyogenes
MSWNWKKTSVLGTLSLASVLPLTACVSGGGKGVKETDGKTIVVSVDEGYVDYIKSIKGEFEKEHKVTVKVKKEGMMDTLDKLSTDGPTGASPDVFLAPF

SEQ ID NO: 161 - DNA, 621 bp, Streptococcus pyogenes
atgacaaaaaaacacttactaacacttcttctcatctctttttttactagctttttggtagcttgttcaacaacgaaagataaagagcctcaaccgtctgattcagaaatcattactccccgactacaccaagccgctcatcaagataaacgcgctaactttgaaaaaattaaacttgcgactgttgattcctcatttacaggagggacaagccttgaagaacttatttcactctttggagagcctagccaacatgatccaaaaacagcaggcgaagtaacaatcgacgcttatacttggcagtttgatcaagttactctcactgttaatctttatcaaaatagtagtattgttaaaaccatctctaattttacctttgcaagagagttaggcttatcgcaaaaggaataccaacaattacaaaaaggaatgtcttatgaagacgttaaaaagatcttaacagaacctgataattatagccaagcgtcatctagtgatcatcaaactttgcaagcgatttgggttagtggcttaaagacagatacaagcggagctaatatttctctcgtttttgaaaataatcagttaacagaaatgtctcaggtaggacttgaagaataa

SEQ ID NO: 162 - protein, 206 aa, Streptococcus pyogenes
MTKKHLLTLLLISFFTSFLVACSTTKDKEPQPSDSEIITPRLHQAAHQDKRANFEKIKLATVDSSFTGGTSLEELISLFGEPSQHDPKTAGEVTIDAYTWQFDQVTLTVNLYQNSSIVKTISNFTFARELGLSQKEYQQLQKGMSYEDVKKILTEPDNYSQASSSDHQTLQAIWVSGLKTDTSGANISLVFENNQLTEMSQVGLEE

SEQ ID NO: 163 - DNA, 867 bp, Streptococcus pyogenes
atgaaaatgaaaaaaaaattctttttgttaagtcttttggccctatcaactttctttttatccgcatgttctagctggattgataaaggtgagtcaataaccgctgtaggatcaacagcactacaacccttagtagaagcagtagctgatgaatttggaagcagtaatctaggcaagactgtcaatgttcaaggtggtggttcaggtacagggttgtctcaagttcaatcaggagctgtccaaattggaaatagtgatgtctttgcggaagaaaaagatggtattgatgcttctaaattagttgatcatcaagtagctgttgcaggacttgcagttattgccaatcctaaagtcaaggtttccaatctcagtagtcagcagttgcaaaagattttttcaggagaatataccaattggaaacaagttggaggagaagatcttgcgatttcagtgatcaaccgagcagcaagttctggctcacgagcaacctttgacagtgttatcatgaaaggggtcaacgctaaacaaagtcaagagcaagactccaatgggatggttaaatcgattgtttcacaaacaccaggtgccatttcttacctttcctttgcctacgttgattcatctgttaaatctttgcaattaaatgggtttaaggcaaatgctaagaacgtggctacaaatgattggccaatctggtcctacgaacacatgtataccaaagataaaccaacagggttgaccaaggaatttcttgattatatgttttcagatgaagtacaacagaacattgttacacatatgggatatatttcgataaatgatatggaagtggtcaaatctcatgatggaaaagtaacaaaaaggtaa

SEQ ID NO: 164 - protein, 288 aa, Streptococcus pyogenes
MKMKKKFFLLSLLALSTFFLSACSSWIDKGESITAVGSTALQPLVEAVADEFGSSNLGKTVNVQGGGSGTGLSQVQSGAVQIGNSDVFAEEKDGIDASKLVDHQVAVAGLAVIANPKVKVSNLSSQQLQKIFSGEYTNWKQVGGEDLAISVINRAASSGSRATFDSVIMKGVNAKQSQEQDSNGMVKSIVSQTPGAISYLSFAYVDSSVKSLQLNGFKANAKNVATNDWPIWSYEHMYTKDKPTGLTKEFLDYMFSDEVQQNIVTHMGYISINDMEVVKSHDGKVTKR

SEQ ID NO: 165 - DNA, 1053 bp, Streptococcus pyogenes
atgaacaagaaatttattggtcttggtttagcgtcagtggctgtgctgagtttagctgcttgtggtaatcgtggtgcttctaaaggtggggcatcaggaaaaactgatttaaaagttgcaatggttaccgatactggtggtgtagatgacaaatcattcaaccaatcagcatgggaaggcctgcaatcttggggtaaagaaatgggccttcaaaaaggaacaggtttcgattattttcaatctacaagtgaatctgagtatgcaactaatctcgatacagcagtttcaggagggtatcaactgatttatggtatcggctttgcattgaaagatgctattgctaaagcagctggagataatgaaggagttaagtttgttattatcgatgatattatcgaaggaaaagataatgtagccagtgttacctttgccgaccatgaagctgcttatcttgcaggaattgcagctgcaaaaacaacaaaaacaaaaacagttggtttcgtgggcggtatggaaggaactgtcataactcgatttgaaaaaggttttgaagcaggagttaagtctgttgacgatacaatccaagttaaagttgattatgctggatcatttggtgacgctgcaaaaggaaaaacaatcgcagcagctcagtatgcagcaggtgctgatgttatttaccaggcagcaggaggcactggagcaggtgtatttaatgaagcaaaagctattaatgaaaaacgtagtgaagctgataaagtttgggttattggtgttgaccgtgatcaaaaagacgaaggaaaatacacttctaaagatggcaaagaagcaaactttgtacttgcatcatcaatcaaagaagtcggtaaagctgttcagttaatcaacaagcaagtagcagataaaaaattccctggaggaaaaacaactgtctatggtctaaaagatggcggtgttgaaatcgcaactacaaatgtttcaaaagaagctgttaaagctattaaagaagcgaaagcaaaaattaaatctggtgacattaaagttcctgaaaaatag

SEQ ID NO: 166 - protein, 350 aa, Streptococcus pyogenes
MNKKFIGLGLASVAVLSLAACGNRGASKGGASGKTDLKVAMVTDTGGVDDKSFNQSAWEGLQSWGKEMGLQKGTGFDYFQSTSESEYATNLDTAVSGGYQLIYGIGFALKDAIAKAAGDNEGVKFVIIDDIIEGKDNVASVTFADHEAAYLAGIAAAKTTKTKTVGFVGGMEGTVITRFEKGFEAGVKSVDDTIQVKVDYAGSFGDAAKGKTIAAAQYAAGADVIYQAAGGTGAGVFNEAKAINEKRSEADKVWVIGVDRDQKDEGKYTSKDGKEANFVLASSIKEVGKAVQLINKQVADKKFPGGKTTVYGLKDGGVEIATTNVSKEAVKAIKEAKAKIKSGDIKVPEK

SEQ ID NO: 167 - DNA, 708 bp, Streptococcus pyogenes
atgacaaaaaagaaaggtaagcttgtacttatcagtctttttgttctagcagcttgtttaggagcttatagtgcaatgagacaatctcataaaacttcaaacgtgtcagctgagactatcgccagttcttcaacccgacattttattgatgaaattggtccaactgctagtactattggtcaagaacgtgatctttatgcgtctgttatgatagcacaagcgattttagaatcaagtaatggtaaatcaagtctaagtcaagcaccttattataattttttcggtattaagggtgcctataacggttcttctgtgacgatgtcaacttgggaagatgatggtaatggcaatacctatacgattgatcaagcctttagagcttatccaagtattgcagactcccttaatgactacgcggacttgctaagttctagcacttatataggtgctagaaaatcaaacacgctatcgtatcaagatgctacagcagctctaactggcttatacgctacagacaccagttataacttaaaactaaataatattattgcaacctatggtttgacggcttatgatgttgctaatagctcagctcaagaaactggtctagcaacttcgggttatgtttggaatgaatatcgtcgtaattacactgatgcggagaccctagcagttgatgaggcttgggctaaacgcatgacttattaa

SEQ ID NO: 168 - protein, 235 aa, Streptococcus pyogenes
MTKKKGKLVLISLFVLAACLGAYSAMRQSHKTSNVSAETIASSSTRHFIDEIGPTASTIGQERDLYASVMIAQAILESSNGKSSLSQAPYYNFFGIKGAYNGSSVTMSTWEDDGNGNTYTIDQAFRAYPSIADSLNDYADLLSSSTYIGARKSNTLSYQDATAALTGLYATDTSYNLKLNNIIATYGLTAYDVANSSAQETGLATSGYVWNEYRRNYTDAETLAVDEAWAKRMTY

SEQ ID NO: 169 - DNA, 549 bp, Streptococcus pyogenes
atgaaaaaattaactctactattaacactctgtttgacaactattaccttaatcgcctgtggtaatcaagcaactaatcattctaacaccgcctcaaaaagtttatcgcctatgcctcaaattgctggtgtgacttattacggagatattcctaaacagcctaagcgagtagtcagtctggcttcaacttacactggttacctcaaaaaattagatatgaatctagtcggggttacttcttatgacaagaaaaaccccatcttagcaaagactgtaaaaaaagcaaagcaagttgctgcaactgatttagaagccgttacaacgcttaagcctgacctcattgttgttggctctacagaagaaaatattaaacaattggcagaaattgcgcctgttatctcgattgaataccgcaaacgtgattatttacaagtgttatctgacttcggccgcatctttaacaaagaagacaaagccaagaagtggttaaaagattggaaaactaaaacagcagcttatgaaaaagaaagtcaaggccgttacaggtga

SEQ ID NO: 170 - protein, 182 aa, Streptococcus pyogenes
MKKLTLLLTLCLTTITLIACGNQATNHSNTASKSLSPMPQIAGVTYYGDIPKQPKRVVSLASTYTGYLKKLDMNLVGVTSYDKKNPILAKTVKKAKQVAATDLEAVTTLKPDLIVVGSTEENIKQLAEIAPVISIEYRKRDYLQVLSDFGRIFNKEDKAKKWLKDWKTKTAAYEKESQGRYR

SEQ ID NO: 171 - DNA, 924 bp, Streptococcus pyogenes
ttgaaactaacattaaatcgcatcctcttttcaggactagcactgtcaattctactcaccttgacaggctgtgtgggaagagacgctcacggaaatcccaaaggtatgatttgggaatttcttggaaaacccatgtcatactttatcgattactttgcaaacaatgctggactaggttatggactggctatcatcatcgtaaccattattgttagaacacttatcttaccactaggtctatatcaatcttggaaagcaagttatcaatctgagaaaatggccttcttgaaacctgtttttgaaccaatcaacaaacgtatcaaacaggcaaatagtcaggaagaaaaaatggctgcccaaacagaattaatggctgctcagcgtgctcatgggattaaccctcttggaggtattggatgtctacctcttctcatccagatgccattcttttctgccatgtattttgccgctcaatacactaaaggagtatcaacaagcacctttatgggtattgatcttggtagccgtagtttagtgttaacagcaattatcgctgctctttacttcttccaatcatggttatcaatgatggccgtttcagaagaacaacgtgagcaaatgaagacgatgatgtacaccatgcctatcatgatgatcttcatgtccttctcactccctgctggtgttggtctttactggctagttggtggtttctttagtattattcaacagttaatcacaacctacctcttaaaacctcgattgcataagcaaattaaagaagaatacgctaaaaacccgcctaaagcataccaatcaacttcttctcgtaaggacgttacgccttcacaaaacatggaacaggctaacttgcctaaaaaaataaaatccaatcgtaatgctggaaaacagcgaaagcgttaa

SEQ ID NO: 172 - protein, 307 aa, Streptococcus pyogenes
MKLTLNRILFSGLALSILLTLTGCVGRDAHGNPKGMIWEFLGKPMSYFIDYFANNAGLGYGLAIIIVTIIVRTLILPLGLYQSWKASYQSEKMAFLKPVFEPINKRIKQANSQEEKMAAQTELMAAQRAHGINPLGGIGCLPLLIQMPFFSAMYFAAQYTKGVSTSTFMGIDLGSRSLVLTAIIAALYFFQSWLSMMAVSEEQREQMKTMMYTMPIMMIFMSFSLPAGVGLYWLVGGFFSIIQQLITTYLLKPRLHKQIKEEYAKNPPKAYQSTSSRKDVTPSQNMEQANLPKKIKSNRNAGKQRKR

SEQ ID NO: 173 - DNA, 843 bp, Streptococcus pyogenes
atgattaaaaaacagtatttaggaagggcaacaattgccctagcatcgacccttgtgctagcagcttgtgggtcatcaaaaacagctgagtcaggaaatcaggggagttctaaagaagtcttatttgcaacggttggaacaacagctcccttttcttatgaaaaaggtggtcaactaactggctacgatatcgaggtggctaaagcagtctttaaaggatcggatgattacaaggtgtcctttaaaaaaacagaatggtcttctatctttacaggtttggactcaggaaaataccaaatgggtggtaacaacatttcctttaccaaagagcgttcagctaagtaccttttttcttatccaatcggatcaacaccttctgttttagttgttccaaaagacagtgatatcaagagctttgatgatatccaagggcatacgacacaagttgttcaagggactacaagtgttgcacagttagaagactttaataagaaacacagtgacaacccggttactctaaaattcaccaatgagaacattactcaaatgttaaccaatttgagtgaaggcaaggcagatttcaagatttttgacgctccaacggttaacgccattattaaaaatcaagggttagataatctcaaaacaattgaactcacctcaacagagcaaccatttatttattttatctttagtcaagatcaagagaaattgcaaagctttgttaacaagcgtattaaagagttgactgctgatggaactcttagcaagcttgccaaagagcaccttggcggtgattacgtgccatcagataaagagttgaaacttcctacagctaactaa

SEQ ID NO: 174 - protein, 280 aa, Streptococcus pyogenes
MIKKQYLGRATIALASTLVLAACGSSKTAESGNQGSSKEVLFATVGTTAPFSYEKGGQLTGYDIEVAKAVFKGSDDYKVSFKKTEWSSIFTGLDSGKYQMGGNNISFTKERSAKYLFSYPIGSTPSVLVVPKDSDIKSFDDIQGHTTQVVQGTTSVAQLEDFNKKHSDNPVTLKFTNENITQMLTNLSEGKADFKIFDAPTVNAIIKNQGLDNLKTIELTSTEQPFIYFIFSQDQEKLQSFVNKRIKELTADGTLSKLAKEHLGGDYVPSDKELKLPTAN

SEQ ID NO: 175 - DNA, 828 bp, Streptococcus pyogenes
ttgagaaaggttttgagagtgaagaaaaacattaaaattgcaagaatagtccccttagttctattattagtggcctgtggtcgtggtgaggtaacggcacaatcatctagtggttgggaccagttggtttacttatttgccagagcaattcaatggctttcctttgatggttcaattggtgttggcattattctttttacccttactatccgtctcatgctcatgcctttgtttaacatgcaaatcaaatcaagccagaagatgcaagacatccaacctgagcttagagaattgcaaaggaaatacgctggtaaagacacacaaacgcggatgaagttggctgaagaaagtcaagccctttacaaaaaatatggggttaacccttatgctagtctcttacccctcttaattcagatgccagttatgattgccttattccaagccttgacacgggtatctttcttaaaaacagggactttcttgtgggtggaattggcacaacatgatcatttgtaccttttaccagttttggcagctgtcttcactttcttgtccacttggttgaccaatctagcggctaaagaaaaaaatgtcatgatgactgttatgatttatgtgatgccgctaatgatctttttcatgggctttaacttggctagtggagtagtgctctattggacggtctccaatgcctttcaagtggtacaactactgttattaaacaatccttttaagattattgcggaaagacaacgtcttgccaatgaagaaaaagaacgccgtcttcgtgaacgtcgtgctcgtaaaaaagcaatgaagagaaaatag

SEQ ID NO: 176 - protein, 275 aa, Streptococcus pyogenes
MRKVLRVKKNIKIARIVPLVLLLVACGRGEVTAQSSSGWDQLVYLFARAIQWLSFDGSIGVGIILFTLTIRLMLMPLFNMQIKSSQKMQDIQPELRELQRKYAGKDTQTRMKLAEESQALYKKYGVNPYASLLPLLIQMPVMIALFQALTRVSFLKTGTFLWVELAQHDHLYLLPVLAAVFTFLSTWLTNLAAKEKNVMMTVMIYVMPLMIFFMGFNLASGVVLYWTVSNAFQVVQLLLLNNPFKIIAERQRLANEEKERRLRERRARKKAMKRK

SEQ ID NO: 177 - DNA, 1233 bp, Streptococcus pyogenes
atgggagttatgatgaaacaaaagattaaaatcttaacagtaattggccttatgacagttggtatgtctgcgtgtcacaacactagcaaaccttctaataccgattctgttttttctttaaccggaaaaaagcgccaacaaatcgtcaaacaagtaagacaacggtattatttccaacaattatccaaaaccgaacaagaaaattacctcactttatacgatagtttagcacaatttcgtgaaatcatcagtttgacgccggcttctaaaaaaagcttaattaaaacaattgacgcctttgtgatggataatcccgaattttactggattacatctgccgattatcgatttgagttttctgatcaaacggtctttgtcacctttcctatcccagaagatgccaagaacatttatcaagacttgcaagcaatcggtaatgatatcgtcgcaaacacgccatcaaaggatcgctatgagcaggtcaaatatttttatgaggtcatcattcgagacacagactacaataaaaaagcctttgaagcctatcaatcaggcagtcaagcccaggtcgcttctaatcaagacattaaaagtgtttttattgatcatttatctgtttgtaatggctatgcccaagcctttcagtttctttgtcaaaaagctggcattccagtcgcctatatccgtggaactggtacatctcagcaacctcagcaatcttttgcacatgcatggaatgctgttcaaattaataacacttattatggcgttgatgtcacttggggtgaccctgtttttgataaccatctctcacatcaaaagcaaggaactatcaattacagttttctatgcctgccagattatctaatggccttatcacatcagccaagcaaagacattgcttttaatactaaagaacgttttgaaaatgtttggactataccttcttgtacagatgattctttgctttattctaaacgtcatcaaagctatatctcaacgtttgacagtgacgccatccttgcaagccttgaaaatcagttgttaaatagacaagagccactgtctctacaatttgctcatcaagatgattatcaacaaatggtaactgatttaacgacgaatcaaacaggttatcataaccttttcaatcagtattggaataattatacgggctttacctatggactcttaccagagactcttagtatttcatttgctagtaggaactag

SEQ ID NO: 178 - protein, 410 aa, Streptococcus pyogenes
MGVMMKQKIKILTVIGLMTVGMSACHNTSKPSNTDSVFSLTGKKRQQIVKQVRQRYYFQQLSKTEQENYLTLYDSLAQFREIISLTPASKKSLIKTIDAFVMDNPEFYWITSADYRFEFSDQTVFVTFPIPEDAKNIYQDLQAIGNDIVANTPSKDRYEQVKYFYEVIIRDTDYNKKAFEAYQSGSQAQVASNQDIKSVFIDHLSVCNGYAQAFQFLCQKAGIPVAYIRGTGTSQQPQQSFAHAWNAVQINNTYYGVDVTWGDPVFDNHLSHQKQGTINYSFLCLPDYLMALSHQPSKDIAFNTKERFENVWTIPSCTDDSLLYSKRHQSYISTFDSDAILASLENQLLNRQEPLSLQFAHQDDYQQMVTDLTTNQTGYHNLFNQYWNNYTGFTYGLLPETLSISFASRN

SEQ ID NO: 179 - DNA, 1044 bp, Streptococcus pyogenes
atgaacaaaaaagtaatgtcacttggtcttgtttcgactgccctattcacattaggaggctgtaccaataactccgctaaacaaacaactgacaattcattaaaaatcgctatgattactaatcagacgggtattgatgacaagtcatttaaccagtcagcctgggaaggcttacaagcttggggaaaagaaaataaacttgaaaaaggaaaaggctatgattatttccaatcagccaatgaatcagagtttaccacaaaccttgagtcagcagtaaccaatggttataatcttgtttttgggattggatttccattacatgacgctgtagaaaaagtagccgcaaacaatcctgacaaccattttgcaattgtggatgatgtgattaaaggtcaaaaaaatgttgcaagtatcaccttttcagaccatgaagcggcatacctagccggtgttgcagcagctaaaacgacaaaaaccaagcaagttggttttgtaggtggtatggaaggagatgttgtcaagcgctttgaaaaaggttttgaagctggtgtgaaatcagtagatgataccatcaaagtaagagttgcttatgcaggctcttttgcagatgctgccaaaggcaagacgattgcagctgctcaatacgctgaaggcgcagatgttatttatcatgcagcaggaggcacaggggcgggtgtctttagcgaagctaagtctatcaacgaaaaacgtaaagaagaagataaggtttgggttattggtgttgaccgtgaccaaagtgaagatggaaaatacactacaaaagatggcaagtcagctaattttgttttgacctcaagtatcaaggaagtcggaaaagctttagtaaaagtagccgtaaaaacctcagaagaccaattcccaggtggtcaaataaccacttttggtttaaaagaaggtggtgttagccttacaacggatgctctgacacaagacactaaaaaagctattgaggctgctaaaaaagcgattatcgaaggaaccatcacagttcctgaaaactaa

SEQ ID NO: 180 - protein, 347 aa, Streptococcus pyogenes
MNKKVMSLGLVSTALFTLGGCTNNSAKQTTDNSLKIAMITNQTGIDDKSFNQSAWEGLQAWGKENKLEKGKGYDYFQSANESEFTTNLESAVTNGYNLVFGIGFPLHDAVEKVAANNPDNHFAIVDDVIKGQKNVASITFSDHEAAYLAGVAAAKTTKTKQVGFVGGMEGDVVKRFEKGFEAGVKSVDDTIKVRVAYAGSFADAAKGKTIAAAQYAEGADVIYHAAGGTGAGVFSEAKSINEKRKEEDKVWVIGVDRDQSEDGKYTTKDGKSANFVLTSSIKEVGKALVKVAVKTSEDQFPGGQITTFGLKEGGVSLTTDALTQDTKKAIEAAKKAIIEGTITVPEN

SEQ ID NO: 181 - DNA, 921 bp, Streptococcus pyogenes
atgaaaaaaggtttttttctcatggctatggtcgtgagtttagtaatgatagcagggtgtgataagtcagcaaaccccaaacagcctacgcaaggcatgtcagttgtaaccagcttttacccaatgtatgcgatgacaaaagaagtatctggagacctcaatgatgtgaggatgatccaatcaggtgcaggcattcattcctttgaaccgtctgtaaatgatgtggcagctatttatgacgcggatttgtttgtttaccattcacataccttagaagcttgggcaagggatctagaccctaatttaaaaaaatcaaaggttgatgtgtttgaagcgtcaaaacctttgacactagatagagtcaaagggctagaagatatggaagtcacacaaggcattgatcctgcgacactttatgacccacatacctggacagatcccgttttagctggtgaggaagctgttaatatcgctaaagagctaggacgtttggatcctaaacacaaagacagttacactaaaaatgctaaggctttcaaaaaagaagcagagcaactaactgaagaatacactcaaaaatttaaaaaggtgcgctcaaaaacattcgtgacgcagcacacggcattttcttatctggctaaacgattcggcttgaaacaacttggtatctcgggcatttccccagagcaagagccctctcctcgccaattgaaagaaattcaagactttgttaaagaatacaacgtcaagactatttttgcagaagacaatgtcaatcccaaaattgctcatgctattgcgaaatcaacaggagctaaagtaaagacattaagtccacttgaagctgctccaagcggaaacaagacatatctagaaaatcttagagcaaatttggaagtgctctatcaacagttgaagtaa

SEQ ID NO: 182 - protein, 306 aa, Streptococcus pyogenes
MKKGFFLMAMVVSLVMIAGCDKSANPKQPTQGMSVVTSFYPMYAMTKEVSGDLNDVRMIQSGAGIHSFEPSVNDVAAIYDADLFVYHSHTLEAWARDLDPNLKKSKVDVFEASKPLTLDRVKGLEDMEVTQGIDPATLYDPHTWTDPVLAGEEAVNIAKELGRLDPKHKDSYTKNAKAFKKEAEQLTEEYTQKFKKVRSKTFVTQHTAFSYLAKRFGLKQLGISGISPEQEPSPRQLKEIQDFVKEYNVKTIFAEDNVNPKIAHAIAKSTGAKVKTLSPLEAAPSGNKTYLENLRANLEVLYQQLK

SEQ ID NO: 183 - DNA, 942 bp, Streptococcus pyogenes
atgactagtaaaaaagcgtgtttatcaagcatcattgtgttagcaagtttaacgtgtggaaatgatactgttagtgccaatcatctctcagcaactggagataagtttgatgattgctcaacacttgttgaaaaagatgtggcccctaaagatgaacttgagatgttagcatggtcctcgtctcaaacaactgatgatgctgacagagactatgaagattttctcgatgatgattcttttatttctcaaaatgaaactgataagatgtttgagaatttaactgatgataggttattaaatgaattagatgaattagatgaagaaaatgaagaagatgaagaagatacaattgagccagagcaaaatgtaataatgcctagtgacgatgagctatttgatttaactgatgctgttgagacacgccttactgtttctagtgctccccatttagaggctgaattgccgaaaccacatttgaggagcctatcagatacagcactgcggtctggtgaaattagaggacatttagataacaaactggacgctttgtctgtaacagctacaaagttagcattaacgatggctcaaaaatttgatttgacaacgcatgtctattctataggtgaaagctttagtgaagtattagctgctcattatgaagacagaaaagcagaatcagctttttctaagaaaaagagatttcaccttcctattgctactccagatgttgttatagaggagttaaggcgcctagtctcttctattggaagttcaaaagaagatgtttcagttccttatagtcggaagctaggtatggcagttgcaaaaagaaaaatagccctgccacaaacgggagagaggttctcttattatccagttttacttggtttaatgatattaggattaacgccgattatgataccaaagaagataaataattag

SEQ ID NO: 184 - protein, 313 aa, Streptococcus pyogenes
MTSKKACLSSIIVLASLTCGNDTVSANHLSATGDKFDDCSTLVEKDVAPKDELEMLAWSSSQTTDDADRDYEDFLDDDSFISQNETDKMFENLTDDRLLNELDELDEENEEDEEDTIEPEQNVIMPSDDELFDLTDAVETRLTVSSAPHLEAELPKPHLRSLSDTALRSGEIRGHLDNKLDALSVTATKLALTMAQKFDLTTHVYSIGESFSEVLAAHYEDRKAESAFSKKKRFHLPIATPDVVIEELRRLVSSIGSSKEDVSVPYSRKLGMAVAKRKIALPQTGERFSYYPVLLGLMILGLTPIMIPKKINN

SEQ ID NO: 185 - DNA, 882 bp, Streptococcus pyogenes
ttgctgacctttggaggtgcaagtgcggttaaggcggaagaaaatgaaaaagtaagagagcaagaaaagctcatacagcaactttctgaaaagctagtggaaattaatgacttacaaactttaaatggtgataaagagagtatacagtctctcgtagattatctgactcgaagaggaaaacttgaagaagaatggatggaatatttgaattctggtattcaacgcaaactttttgttggtccaaaaggacctgcaggtgaaaaaggagaacaaggtcctactggaaaacaaggcgagcgtggtgagaccggccctgcaggtccacgtggtgacaagggcgaaactggtgacaaaggagcccagggtccagtaggtcccgctggcaaggacggccaaaacggtaaagatggtcttccaggtaaagacggcaaggacggccaaaacggtaaagatggtcttccaggtaaagacggcaaggacggccaagacggtaaagatggcctcccaggtaaagacggtaaggatggccaaaatggcaaagatggtcttccaggtaaagacggtcaaccaggtaaaccagctcctaaaacaccagaggtccctcaaaacccagatactgcaccacatactccaaaaacccctcggatccctggtcaatcaaaagacgtgacacctgctcctcaaaacccttctaatagaggtctaaacaaaccacaaacacaaggtggtaatcagctcgcaaaaacaccggcagctcacgacacacacagacaattgccagcaacaggcgaaacaaccaatccattctttacagcagctgctgtagctatcatgacgacagctggagttgtagctgttgcaaaacgtcaagaaaacaactaa

SEQ ID NO: 186 - protein, 293 aa, Streptococcus pyogenes
MLTFGGASAVKAEENEKVREQEKLIQQLSEKLVEINDLQTLNGDKESIQSLVDYLTRRGKLEEEWMEYLNSGIQRKLFVGPKGPAGEKGEQGPTGKQGERGETGPAGPRGDKGETGDKGAQGPVGPAGKDGQNGKDGLPGKDGKDGQNGKDGLPGKDGKDGQDGKDGLPGKDGKDGQNGKDGLPGKDGQPGKPAPKTPEVPQNPDTAPHTPKTPRIPGQSKDVTPAPQNPSNRGLNKPQTQGGNQLAKTPAAHDTHRQLPATGETTNPFFTAAAVAIMTTAGVVAVAKRQENN

SEQ ID NO: 187 - DNA, 3525 bp, Streptococcus pyogenes
ttgaatgttatactaaatggaggtcttatgaaaaagaaagtcaaccaaggatcaaagcgctatcaatatctgttaaaaaagtgggggataggttttgtaatcgctgcaactgggactgtcgtgttagggtgcacccctagtatcttaacacatcaagttgctgctaaaaccattgttggactagcccgcgatgaagctcaacaaggagatggcaatgctaaatctggtgatggtcttcaatcgtctagcaaggaggcaaaaccagttttagacagctcgtcagctaatcctgctagtattgctgagcatcatttgcgtatgcattttaaaacattgccagctggtgagtcgctaggaagcttgggactttgggtgtggggagatgtggatcaaccttcaaaggattggccaaatggtgctatcaccatgacaaaagcgaaaaaagatgactatggctattatctagatgtgccactagcagctaaacaccgccagcaagtgtcttatctcattaataataaagctggagagaatctttcaaaggaccagcacatctcgcttctcacgccaaaaatgaatgaagtttggatagacgagaattaccatgcgcacgcttatcgacctttgaaaaaaggttaccttcgaatcaactaccacaatcaatcgggacactacgataacttagctgtctggacctttaaagatgtcaaaaccccaacgaccgactggccaaatggacttgacttgtcacataaagggcattatggagcttatgttgatgtccccttaaaagaaggagctaacgaaatcggatttttaatccttgataaaagtaagacaggagatgctattaaagtgcaaccaaaagattatctatttaaagagttagacaatcatactcaggtttttgtcaaagacactgacccaaaagtttacaacaatccttattatattgatcaggttagtctcaaaggagctgaacaaaccacgccaaatgagattaaagccatttttacgaccttagatgggcttgatgaagatgcggtgaaacaaaacatcaagatcactgacaaagcagggaaaactgttgcaattgatgagttgacacttgacagggataagtctgtaatgacattaaagggtgattttaaggcgcaaggtgcagtctacacggttacatttggagaagttagccaagtcgctcgccaatcctggcaattaaaagataaactctatgcttacgatggtgaacttggagctaccctagctaaggatggttctgttgatttagcgctatggtctccaagtgctgatactgttaaggttgtcgtttatgataaacaagatcagacaagggtggttggtcaagctgatttgaccaagtcggacaagggtgtttggagagctcatctaacttctgacagtgtcaagggcattagtgattacacaggctactattacctttatgaaatcacgcgcggtcaggaaaaagtcatggttttggatccttacgccaaatctctcgctgcctggaatgatgcgactgctactgatgacatcaaaacagcaaaagctgcctttattgatccaagcaaactaggaccaacaggccttgattttgccaaaattaacaactttaaaaagcgtgaagacgctattatctatgaagcacatgtgcgagattttacgtcagataaggctctagaaggcaagttaacacacccttttgggactttttcagctttcgttgaacagctagactatctcaaagacttgggggttacccacgttcaattgctaccggttttgagttatttttatgccaatgagctggacaagagccgctcaacagcctacacgtcttcagacaataattacaactggggttatgacccacaacactactttgccctttctggcatgtattcggcaaatcctaatgaccctgctttacgtatcgcagagcttaaaaaccttgtcaatgagattcacaaacgtggtatgggtgttatttttgatgtggtctataaccacacggctagaacctatctctttgaagatttggaacccaactactatcattttatgaatgctgatggtacagctagagagagttttggcggaggtcgtctaggaacgacacatgccatgagtcgtcgtatcttggtggattcgattacttatctgactcgtgaattcaaggtagatggttttcgtttcgacatgatgggtgaccatgatgcggcagctattgagcaagcctttaaggcagccaaagccattaatccaaataccattatgattggcgaaggctggcgtacctaccaaggtgatgaggggaaaaaagaaattgcggcagatcaagattggatgaaagcaaccaatacggtcggtgttttctctgatgatatcagaaataccctcaagtcaggttttccaaatgaaggcacagcagcctttattactggtggcgcaaaaaatctagaaggtttattcaaaacgatcaaagcacagcctggtaactttgaagcagatgccccaggagatgtagtgcagtatattgcagcccatgacaacctgaccttacatgatgtcattgccaaatccatcaataaggatcctaaagtggctgaagaagagattcacaagcgtattcgtctaggaaataccatgattttaactgctcaagggactgcctttatccattctggtcaggaatatggacgaaccaagcagcttctaaatcccgactacaagacaaaggcgtctgatgacaaggtgccaaataaggcgactctgattgatgctgtagcgcaatacccttacttcatccacgattcttatgattcgtctgatgcggtcaatcattttgactgggcaaaggcaacagattccatagctcacccgattagcaaccaaacaaaagcctatacacagggactaattgcgttgcgtcgctcaacagatgcctttacaaaagcaaccaaagctgaggtagatcgggatgtgaccttgatcacccaagcaggacaagatggtattcaacaagaggacctcatcatgggttaccaaacagtggcatcaaatggagatcgctatgctgtctttgtcaatgcagacaacaagacccgcaaggtagttttacctcaagcctaccgctatttgctaggagcccaagtgcttgttgatgctgagcaagctggtgttactgccattgctaagcctaagggagtccagtttaccaaagaaggcttgactattgaaggcctaactgccctggtcctcaaagtatcctcaaaaacggctaatccctctcagcaaaagagtcagacagacaatcatcaaaccaaaacaccagatggctcaaaagacctagacaaatcattaatgactagaccaaaaagagctaaaacaaaccaaaagctcccaaaaacgggtgaagcctcctcaaaaggcttattagcagctggaatagctctgcttttattggctattagcctgttgatgaagcgccaaaaagattag

SEQ ID NO: 188 - protein, 1174 aa, Streptococcus pyogenes
MNVILNGGLMKKKVNQGSKRYQYLLKKWGIGFVIAATGTVVLGCTPSILTHQVAAKTIVGLARDEAQQGDGNAKSGDGLQSSSKEAKPVLDSSSANPASIAEHHLRMHFKTLPAGESLGSLGLWVWGDVDQPSKDWPNGAITMTKAKKDDYGYYLDVPLAAKHRQQVSYLINNKAGENLSKDQHISLLTPKMNEVWIDENYHAHAYRPLKKGYLRINYHNQSGHYDNLAVWTFKDVKTPTTDWPNGLDLSHKGHYGAYVDVPLKEGANEIGFLILDKSKTGDAIKVQPKDYLFKELDNHTQVFVKDTDPKVYNNPYYIDQVSLKGAEQTTPNEIKAIFTTLDGLDEDAVKQNIKITDKAGKTVAIDELTLDRDKSVMTLKGDFKAQGAVYTVTFGEVSQVARQSWQLKDKLYAYDGELGATLAKDGSVDLALWSPSADTVKVVVYDKQDQTRVVGQADLTKSDKGVWRAHLTSDSVKGISDYTGYYYLYEITRGQEKVMVLDPYAKSLAAWNDATATDDIKTAKAAFIDPSKLGPTGLDFAKINNFKKREDAIIYEAHVRDFTSDKALEGKLTHPFGTFSAFVEQLDYLKDLGVTHVQLLPVLSYFYANELDKSRSTAYTSSDNNYNWGYDPQHYFALSGMYSANPNDPALRIAELKNLVNEIHKRGMGVIFDVVYNHTARTYLFEDLEPNYYHFMNADGTARESFGGGRLGTTHAMSRRILVDSITYLTREFKVDGFRFDMMGDHDAAAIEQAFKAAKAINPNTIMIGEGWRTYQGDEGKKEIAADQDWMKATNTVGVFSDDIRNTLKSGFPNEGTAAFITGGAKNLEGLFKTIKAQPGNFEADAPGDVVQYIAAHDNLTLHDVIAKSINKDPKVAEEEIHKRIRLGNTMILTAQGTAFIHSGQEYGRTKQLLNPDYKTKASDDKVPNKATLIDAVAQYPYFIHDSYDSSDAVNHFDWAKATDSIAHPISNQTKAYTQGLIALRRSTDAFTKATKAEVDRDVTLITQAGQDGIQQEDLIMGYQTVASNGDRYAVFVNADNKTRKVVLPQAYRYLLGAQVLVDAEQAGVTAIAKPKGVQFTKEGLTIEGLTALVLKVSSKTANPSQQKSQTDNHQTKTPDGSKDLDKSLMTRPKRAKTNQKLPKTGEASSKGLLAAGIALLLLAISLLMKRQKD

SEQ ID NO: 189 - DNA, 1302 bp, Streptococcus pyogenes
ttgctaatgccctttgatagtaacacttatattataccattgaaatatattatattctgctttttttgtaaaatgtttatgaaaatagagaggagttcattttcaatggaagaaaaattgtttaacaaacattttgtggccatcacagtaataaactttatagtctatatggtctactatctttttacagttattattgcctttgtggcgactagagagctaggagctcagactagccaggcaggattggcaacagggatttatattctagggactttattagcccgtttgatttttggaaagcagttggaggtgtttggtcgtcgtttggttttaagaggaggtgctattttttacctcttaacgaccttagcctacttttatatgccaacgattagcatgatgtacttggttcgtttcttgaacggatttggttatggtgtagtatcaactgcgacaaataccattgtaacagcctatattccagctcgtaaaagaggagaaggaattaatttttatggcttgtcaaccagtctagcagcagctattggcccttttgtaggaacctttatgttggataatcttcatattgattttcgcatgattattgtcttatgtagcgtcttgattgggtgtgtggttgttggtgcttttgcttttccagtcaaaaacatgtctttaaatgcggagcaattggctaaaaccaaatcgtggactgtggatagtttcattgagaaaaaagccttgtttatcactgcaatcgcctttttaatggggattgcctatgcttcagttttaggatttcaaaaattatacacgtctgaaattcatttgacaacagtaggcgcttatttctttgtggtctatgccttaatcattaccatcactcgtccagcaatgggacgtttaatggatgctaaaggcgataaatgggtcttgtacccaagttatctttttttagcaatgggactcttcttgctaggtagtgtatcgtctggaggaagctatttgctttcaggagccttgattggctttggttatggcacttttatgtcttgtggtcaagccgcctccatacaaggagtggatgagcaccgctttaatacggctatgtctacttatatgattggtcttgatttaggtttaggtgctgggccttacctcttgggcttgattaaagatttggcacttggtagtggtgtggcttcctttaggcacttattctggttagctgctgtgattccactgatttgtaccttgctttacttgttaaaaacaaagacaagacaggttgtgtcttaa

SEQ ID NO: 190 - protein, 433 aa, Streptococcus pyogenes
MLMPFDSNTYIIPLKYIIFCFFCKMFMKIERSSFSMEEKLFNKHFVAITVINFIVYMVYYLFTVIIAFVATRELGAQTSQAGLATGIYILGTLLARLIFGKQLEVFGRRLVLRGGAIFYLLTTLAYFYMPTISMMYLVRFLNGFGYGVVSTATNTIVTAYIPARKRGEGINFYGLSTSLAAAIGPFVGTFMLDNLHIDFRMIIVLCSVLIGCVVVGAFAFPVKNMSLNAEQLAKTKSWTVDSFIEKKALFITAIAFLMGIAYASVLGFQKLYTSEIHLTTVGAYFFVVYALIITITRPAMGRLMDAKGDKWVLYPSYLFLAMGLFLLGSVSSGGSYLLSGALIGFGYGTFMSCGQAASIQGVDEHRFNTAMSTYMIGLDLGLGAGPYLLGLIKDLALGSGVASFRHLFWLAAVIPLICTLLYLLKTKTRQVVS

SEQ ID NO: 191 - DNA, 948 bp, Streptococcus pyogenes
atgatcattttatttattattttattacctttacattcatcaataagcctgttaaaatggtatttgttatattttattatttggaggaaaccagaaaacatggaaatgacatggactgtgaaatacatcacagaatttatcgcaacggcttttttgattattttgggaaatggagctgttgctaacgtcgacttaaaaggaacaaaaggacataactcaggttggttagtgattgcttttggctatggcttaggagttatgatgccagctttgatgtttggtaatgtatctggaaaccatattaatcctgctttcacagttggactagcagtatcaggcttgttcccatgggctcacgtcttacaatacgttgtggcacaattacttggagctatctttggtcagttggtagtggtaatggtttataaaccttactttatgaaaactgaaaatccaaatcatgttttaggctcattctcaacgatttcatctcttgataatggtcaaaaagacagtcataaagcctcttatatcaatggtttcttaaacgaatttgtaggttcatttgttcttttctttggtgctttggctttgactaaaaactactttggggtagagttagttggtaaattgattgaagcaggctacgaccaaacaactgcagcaacacaaatttcaccatacgtgacaggctcattggcggttgctcacattggtattggtttcttagttatggtcttggttacttcattaggtggaccaactgggccagcactaaacccagcgcgtgattttgggcctcgtttgttacaccacttcttaccaaaatcagttcttggtcaagccaaaggtgattcaaaatggtggtatgcatgggttcctgtagttgcacctatcttagcggcgatagtagccgtagcagcgtttaaatacctttatatcagataa

SEQ ID NO: 192 - protein, 315 aa, Streptococcus pyogenes
MIILFIILLPLHSSISLLKWYLLYFIIWRKPENMEMTWTVKYITEFIATAFLIILGNGAVANVDLKGTKGHNSGWLVIAFGYGLGVMMPALMFGNVSGNHINPAFTVGLAVSGLFPWAHVLQYVVAQLLGAIFGQLVVVMVYKPYFMKTENPNHVLGSFSTISSLDNGQKDSHKASYINGFLNEFVGSFVLFFGALALTKNYFGVELVGKLIEAGYDQTTAATQISPYVTGSLAVAHIGIGFLVMVLVTSLGGPTGPALNPARDFGPRLLHHFLPKSVLGQAKGDSKWWYAWVPVVAPILAAIVAVAAFKYLYIR

SEQ ID NO: 193 - DNA, 951 bp, Streptococcus pyogenes
atggtttacgaaatgactttggcggtcattaaatgtattgaaaaccatcttcacaaaaaagtatacaaaggggccagtctggctctctttcaatctggtcgatggcaagaataccatatcggaacaattgatggaagacgaccagttgatgctaacttagtttatgacttggctagtgtttcaaaagttgttggtgtggccacaatatgcaatattttattgaataatggtacgttagcattagatgatcccttaaaggtatattatcctagtattgctgatgcgactgtcactattcgacagttattgactcataccagtggtcttgatccttatattcctaacagagatgttttaaatgcacaacaattaagaaaagcacttaatcatcttactcaaaaagaaaataaaaacttttattacacagatgtcaatttcctcttgttaggcttcatgttagaagagctctttagtgaatctttagaccagatatttgacaagactatctttactccctttgggatgtatcatacgtcttttggccctcgtccagaagctgtaccaacattaaagggtgtgagtgatggagaagttcatgatcccaaagcaaaaatcttaaaaaaacattctggatctgcggggctattttcaactcttgcagatttagaaagttttagcaatcattatcttaatgatccattttcagattgtctgtggcgcaactacagccaacaaacaattgagcggtcactagggtggaatttagatggcgattggattagtcatacaggttacacagggccgtttctaatgcttaataaaaaagagcaaacggcagctatttttttgaccaaccgtacttacgacgaggatgataaaagtaaatggttaaaagaacgtcagttgctttacaatgcactaaagcatgatctgacaacccccgtatcgtaa

SEQ ID NO: 194 - protein, 316 aa, Streptococcus pyogenes
MVYEMTLAVIKCIENHLHKKVYKGASLALFQSGRWQEYHIGTIDGRRPVDANLVYDLASVSKVVGVATICNILLNNGTLALDDPLKVYYPSIADATVTIRQLLTHTSGLDPYIPNRDVLNAQQLRKALNHLTQKENKNFYYTDVNFLLLGFMLEELFSESLDQIFDKTIFTPFGMYHTSFGPRPEAVPTLKGVSDGEVHDPKAKILKKHSGSAGLFSTLADLESFSNHYLNDPFSDCLWRNYSQQTIERSLGWNLDGDWISHTGYTGPFLMLNKKEQTAAIFLTNRTYDEDDKSKWLKERQLLYNALKHDLTTPVS

SEQ ID NO: 195 - DNA, 483 bp, Streptococcus pyogenes
atgatttcttatgaaaaagtgcgtcaggcactcaaaacgtctactattgccattattattctaaacgggcttggagttgtactgtcattaatgggatttgcagggattttctacttacaaagccaactcaagaatgaagcatttcgggcccaattaacaactgagcaattggcacagctacaaagcagcatgacaccatttatgattttcttatctgtcttaaatgtccttgctattattgctatcattgtcttttgtgctcaaaacttatctaaattaaaacaaggtctaacggttagttatattccttatatcttaggccttatcctttctgttatcggcttggttaaccagttcacaacaaccatgtcaatggttggaactatccttatccttatacaagctgctctttatggctttgctttttacaaggctaaaacccttaacgaaaaaggtgatgatacagaccaagctatgctgtaa

SEQ ID NO: 196 - protein, 160 aa, Streptococcus pyogenes
MISYEKVRQALKTSTIAIIILNGLGVVLSLMGFAGIFYLQSQLKNEAFRAQLTTEQLAQLQSSMTPFMIFLSVLNVLAIIAIIVFCAQNLSKLKQGLTVSYIPYILGLILSVIGLVNQFTTTMSMVGTILILIQAALYGFAFYKAKTLNEKGDDTDQAML

SEQ ID NO: 197 - DNA, 2454 bp, Streptococcus pyogenes
atggaatacgtttttacaggtactgttgatcgtatcatttttgaaaaccaggctaatttctttaaaattctcctccttgccattgaggatacagacagtgacattgacgactttgaaatcattatcacaggaacgatggctgacattattgaaggagatgactacaccttttggggggaattgacccagcaccctaaatatggacagcaactcaaactaagccgttaccaaaaaatcaaacctagttcatctggtttggttaattatttctctagcgaccattttaaggggattggtaaaaaaacagcggagaaaatcattgcgctatatggtcataataccattgaccatattttagaagacccaagcaaattagaaactatctctggcctatctaaggctaatcgtcaagcctttgtcgctaaactaaaattgaattacggcacagagcaactgattgctggtctcgtcgaacttggccttagcaaccgttttgcccttcaagcgtttgaaaagtataaagaagaggctcttgaccttgttaaagaaaatccctatcagttagtcgaagatctacaaggttttgggtttaaaatggcagatgctctcgctgaaaacttagggattgaaagcgactctccgaaacgttttcgtgcagccctccttcactgtctcttggaagaatccatcaatcgaggagatacttatgtccaagcacgacaattattagactttgccatcacactccttgaagatgcacgtcaagtagaatgtgatcctgctgctgtggctgaacaactaagcgagttaatcatagagggcaaaatcaaaaacagtgacaccaaactgtttgatgctagcctttattttgctgaagaagggattgctaacaacatctctcgtctcttagatactcctttaagtcagtcatttagtcatgataccattcaaacaaccatccaagccgttcaaaaagactttgccatcacctatgaccaagtgcagcaagaagccattactaaggctttaaccagcaaggtctttctcctaacaggtggtcccggaacaggaaaaacaactgttattcgaggcattttgcaggcttacgcgaacctgcatcagattgatttggataaaaaagaccttcctatcttgttagcagctccaacaggtcgggctgcacgtcgcatgaatgagttgactggacttcctagcgcaaccatccacaggcacttaggcctcaatggcgacaacgattaccaagccatggaggattatctagactgcgacctgctgattgtcgatgaattttcaatggtggatacctggcttgccaaccagttgttaggagctattaactcaacaactcaagtgattattgtcggagatagtgaccagcttccttcggttggacccggtcaagtcctgtcagatcttttaaaagtcaatagcctgccccaaatcgccttgcaaaagatatttcgtcaatcccaagaatctactattgtcaatttggcagaccagatgcgtcgaggaatcttagctgctgactttcgtgataaaaaagctgaccgttcttattttgaagcccaagcagcctttatccctgacatgattcaaaaaattgtcctatctgctattaaaagtggcatccctgctgaggaaattcaaattttagcacctatgtacaaaggacaagctggcatcaatcatcttaatcaactcatgcaagaacttctcaatcccttgcaaggacaaacagaatttctgttcaatgatacgcattttcgtaaaggtgataaagtcctccacttagtcaacgatgctcagttgaatgtctttaacggagatattggttatattacagatttgattcctgctaaatacaccgaatctaagcaagacgaattaatcttagattttgacggtagcgaagtcacgtaccctagaaatgaatggctaaaattaaccctggcctatgccatgagcattcataaatcgcaagggagtgagtttcaagtggtgattttacctatcacacgccaaagcggccgactcttgcaacgaaatgtgatttacacggccattactcggtctaaaagtaagttaattctgttgggagaatatactgcctttgagtatgctattaaacacgaaggcgataaacgccaaacctacttgatcgaacgcttccaagaacaatccgacttagcctcctctcaacctaaccaagagctaaaatcaaaagagcagacctcccttttttctaatacggcaacccttgaggacgactctcaaaaatcttcctctcaatcaacaaactctaaccccactgagaactctcagtcagataatgatgattttaggttaacacctgagaattattcgactatcgattcgatgatagggcttacagaatcagatattgccctctttttccagaaaaaatcctag

SEQ ID NO: 198 - protein, 817 aa, Streptococcus pyogenes
MEYVFTGTVDRIIFENQANFFKILLLAIEDTDSDIDDFEIIITGTMADIIEGDDYTFWGELTQHPKYGQQLKLSRYQKIKPSSSGLVNYFSSDHFKGIGKKTAEKIIALYGHNTIDHILEDPSKLETISGLSKANRQAFVAKLKLNYGTEQLIAGLVELGLSNRFALQAFEKYKEEALDLVKENPYQLVEDLQGFGFKMADALAENLGIESDSPKRFRAALLHCLLEESINRGDTYVQARQLLDFAITLLEDARQVECDPAAVAEQLSELIIEGKIKNSDTKLFDASLYFAEEGIANNISRLLDTPLSQSFSHDTIQTTIQAVQKDFAITYDQVQQEAITKALTSKVFLLTGGPGTGKTTVIRGILQAYANLHQIDLDKKDLPILLAAPTGRAARRMNELTGLPSATIHRHLGLNGDNDYQAMEDYLDCDLLIVDEFSMVDTWLANQLLGAINSTTQVIIVGDSDQLPSVGPGQVLSDLLKVNSLPQIALQKIFRQSQESTIVNLADQMRRGILAADFRDKKADRSYFEAQAAFIPDMIQKIVLSAIKSGIPAEEIQILAPMYKGQAGINHLNQLMQELLNPLQGQTEFLFNDTHFRKGDKVLHLVNDAQLNVFNGDIGYITDLIPAKYTESKQDELILDFDGSEVTYPRNEWLKLTLAYAMSIHKSQGSEFQVVILPITRQSGRLLQRNVIYTAITRSKSKLILLGEYTAFEYAIKHEGDKRQTYLIERFQEQSDLASSQPNQELKSKEQTSLFSNTATLEDDSQKSSSQSTNSNPTENSQSDNDDFRLTPENYSTIDSMIGLTESDIALFFQKKS

SEQ ID NO: 199 - DNA, 660 bp, Streptococcus pyogenes
gtgctaaacttcacttcgccaacactcacaaagcgcaagcgcttctcactaaataaaaggaatcatatgaaacagtttattaaagaatggggcccattcactctctttttaattctctttggtctatctcgtctttttttgtggcaggctgttaaagtagacggccattctatggacccaactctagctcatggcgaacgccttatcgtttttaatcaagctagaattgatcgctttgatattgtagttgctcaggaagaagaaaacggacaaaagaaagaaatcgtaaaaagagttattggattgccaggcgataccatttcttataatgatgacacactttatattaatggtaaaaaaacagttgagccgtatttggctgagtatctaaaacaatttaaaaacgataaactccaaaaaacttacgcctataataccctattccaacagttagcagaaacatctgatgcttttacaactaattctgagggacaaacacgctttgagatgagtgttccaaaaggagaataccttcttcttggtgatgatcgtattgtttccagggatagtcgcgaagttggtagtttcaaaaaagaaaaccttatcggtgaagtgaaagctcgtttttggccactcaataaaatgaccgtttttaattag

SEQ ID NO: 200 - protein, 219 aa, Streptococcus pyogenes
MLNFTSPTLTKRKRFSLNKRNHMKQFIKEWGPFTLFLILFGLSRLFLWQAVKVDGHSMDPTLAHGERLIVFNQARIDRFDIVVAQEEENGQKKEIVKRVIGLPGDTISYNDDTLYINGKKTVEPYLAEYLKQFKNDKLQKTYAYNTLFQQLAETSDAFTTNSEGQTRFEMSVPKGEYLLLGDDRIVSRDSREVGSFKKENLIGEVKARFWPLNKMTVFN

SEQ ID NO: 201 - DNA, 504 bp, Streptococcus pyogenes
atgatggaatcatatgaacacttttatgccaaactatctcaaccttttagaaaaaccccacagttaataattcttttaaatgttttactaaaaataatcacaggagtgatgtacatactttatccatcttttctgatatttacgctttggcaagggatgacatttcaattatggttaaggttattaattattcctgctgttggctttatagctttgtcttacattaggaaacgctttgattttccacgaccgtatgaaaaatggaatattaaacctttaattgataaggatacaaagggaaggtcaatgcctagcagacatgttttttcagctacgatgattagtatgtgtttgttacgatattatgtttactttggaatagtttgtttaatattatcggctttattggcaatttgccgtgtgatagcaggtattcactatcctaaggatgttattgtaggttaccttattggcttgatgttagggctttgtttattgatttag

SEQ ID NO: 202 - protein, 167 aa, Streptococcus pyogenes
MMESYEHFYAKLSQPFRKTPQLIILLNVLLKIITGVMYILYPSFLIFTLWQGMTFQLWLRLLIIPAVGFIALSYIRKRFDFPRPYEKWNIKPLIDKDTKGRSMPSRHVFSATMISMCLLRYYVYFGIVCLILSALLAICRVIAGIHYPKDVIVGYLIGLMLGLCLLI

SEQ ID NO: 203 - DNA, 1884 bp, Streptococcus pyogenes
  Unsure (1700)..(1700): unsure
atggataatcgtcagattgcagctgaagtgattgaggctttaggtggccgagaaaatgtgagaagtgttgcccactgtgcaactcgccttcgcgtgatggtttatgatgaaggaaagattgataaggaaaaagcagaagctattgacaaggttaaaggagctttctttaactctggtcaatatcagatgatttttggaactggtaccgttaataacatttatgacgaagttgttgctcttggtttacccacgtcatcaaccagtgagcaaaaggcagaagcaggcaaacatggcaatatcttccaacgggcgattcgtacgtttggagatgtctttgttcccattattccagctattgtagcaacgggtctctttatgggggttcgtggtttggtgacccagccagctattatggatttatttggggtgcatgagtacggggaaaattttctcatgtacactcgtattctaacggatacagcctttgtctacttgccagctttggtggcttggtcagcctttagggtctttgggggtaatcctattatcggtattgttttaggattgatgctggtttccaatgagttgcctaatgcttgggtagttgcctctggtggagatgttaagccgctaaccttctttggatttgttcctgttgttggttatcaaggtaccgttttacccgccttctttgttggtctggtaggagctaagttggagaaatggttgcacaaaaaggttccagaagctttggacttattggtcacaccgtttttaacgtttgctattatgagtaccttgggactatttgtgattggaccagttttccattctcttgaaaaccttgttctggctgggacacaggccgtcttgcatttgccgtttggcattgcaggcttgattgttgggggaatccaacaattaatcgtagtgactggtattcaccatatctttaacttcctagaagcgcagctgattgccaataccggaaaagatcctttcaatgcttacctaacagcagcaacagctgctcaagctggagctaccttagctgttgctgttaaaaccaaatcaacaaaactaaaaggtctggcctttccatcaaccttgtcagctcttttagggattactgaaccagctatttttggggtcaacctccgttatccaaaagtctttgtttcaggtcttattggtggtgccttaggtggttgggtcgctgggctctttggcattgcaggaactggttttgggattaccgtcttaccaggaactctcctttacttgaatggccaattattacaataccttgtgactatgcttgtcggtcttggggtagcctttgcaattgcttatacttggggttatcaagatagagaaacccttccgttaccagctgtcgaagttgatcaaacggctgatcagccagccttagcagaggaaactttatatagtcctttgaatggaacagttgtagacttatctgcggtttcagaccctgttttttcatcaggtgctatgggtcaaggcttagcaattaagccagaagataataccctatactcaccagttgatggtaaagttgaaattgtctttgaaacaggtcatgcctatgctataacgtcaagtcaaggagcagaagtgttacttcatattggtattgataccgagtcgatggcaggagatggctttgaatctcttgnagcagtaggacaggcggttaaaaacggtgatcttctaggctgctttgatcctagcaagattgcagaagctgcactagatgacaccgccgtgatgattgtgaccaatagcactgactatcaaagcgtggacattcgtgctcaaggacatgttttgagtggtgatcaagtggcacttatcaaataa

SEQ ID NO: 204 - protein, 627 aa, Streptococcus pyogenes
  UNSURE (567)..(567): unsure
MDNRQIAAEVIEALGGRENVRSVAHCATRLRVMVYDEGKIDKEKAEAIDKVKGAFFNSGQYQMIFGTGTVNNIYDEVVALGLPTSSTSEQKAEAGKHGNIFQRAIRTFGDVFVPIIPAIVATGLFMGVRGLVTQPAIMDLFGVHEYGENFLMYTRILTDTAFVYLPALVAWSAFRVFGGNPIIGIVLGLMLVSNELPNAWVVASGGDVKPLTFFGFVPVVGYQGTVLPAFFVGLVGAKLEKWLHKKVPEALDLLVTPFLTFAIMSTLGLFVIGPVFHSLENLVLAGTQAVLHLPFGIAGLIVGGIQQLIVVTGIHHIFNFLEAQLIANTGKDPFNAYLTAATAAQAGATLAVAVKTKSTKLKGLAFPSTLSALLGITEPAIFGVNLRYPKVFVSGLIGGALGGWVAGLFGIAGTGFGITVLPGTLLYLNGQLLQYLVTMLVGLGVAFAIAYTWGYQDRETLPLPAVEVDQTADQPALAEETLYSPLNGTVVDLSAVSDPVFSSGAMGQGLAIKPEDNTLYSPVDGKVEIVFETGHAYAITSSQGAEVLLHIGIDTESMAGDGFESLXAVGQAVKNGDLLGCFDPSKIAEAALDDTAVMIVTNSTDYQSVDIRAQGHVLSGDQVALIK

SEQ ID NO: 205 - DNA, 996 bp, Streptococcus pyogenes
atgcagttgtcaaggctgatgcttatggtcatggtgctgtccaggtgtcaaaagcactcctaccttcaagtggatgggtactgtgtgtcaaatcttgatgaggctttgcaattacgtcaagcaggtattgataaagagattttaattcttggggttttgctgccaaatgaattagagttagcagttgctaatgctattactgttacaatcgctagtttagactggatagctttagctagactggagaaaaaagaatgtcaaggcttaaaagttcatgtaaaagttgattctggtatggggcggatcgggcttcgttcttcaaaagaagtcaatttattgattgatagtctaaaagagttgggtgctgatgtagaaggtattttcactcattttgccacagctgatgaggcagatgatactaaatttaaccagcagttacagttttttaaaaagctgatagctggacttgaggataagcctcgtttagtacatgctagtaattcagccacaagtatctggcatagtgataccatttttaatgctgttcgtttaggaattgtcagttatggtttgaatccaagtggttctgatctaagcttaccgtttccactgcaagaggctttatctctagaatctagcttagtgcatgtcaagatgatttcagctggtgatacagtcggttatggagctacttatactgccaaaaagtctgaatatgtagggactgtcccaatcggttatgcagatggctggaccaggaacatgcaaggcttttcggtgttagttgatggacaattctgcgaaattatagggcgtgtatcgatggatcaactgaccatacgacttcccaaagcatatcctttaggaacaaaagtcactttgattggcagcaatcagcaaaaaaatatttctacaacagatatcgcaaattaccgtaatacaatcaattatgaagttctatgccttttaagtgaccgtattcctcggatatattaa

SEQ ID NO: 206 - protein, 331 aa, Streptococcus pyogenes
MQLSRLMLMVMVLSRCQKHSYLQVDGYCVSNLDEALQLRQAGIDKEILILGVLLPNELELAVANAITVTIASLDWIALARLEKKECQGLKVHVKVDSGMGRIGLRSSKEVNLLIDSLKELGADVEGIFTHFATADEADDTKFNQQLQFFKKLIAGLEDKPRLVHASNSATSIWHSDTIFNAVRLGIVSYGLNPSGSDLSLPFPLQEALSLESSLVHVKMISAGDTVGYGATYTAKKSEYVGTVPIGYADGWTRNMQGFSVLVDGQFCEIIGRVSMDQLTIRLPKAYPLGTKVTLIGSNQQKNISTTDIANYRNTINYEVLCLLSDRIPRIY

SEQ ID NO: 207 - DNA, 1512 bp, Streptococcus pyogenes
atgaataaaaacaaactattaagagttgccatgctactaagtctcttagccccgacagcagaaagcatgacagtgctggctcaagatgtaatgcttgagacgcataaagcaactacaaatgaaaccagtgattcttcttcaaaagaggaaaataataaaaatgcagcacctacaacatcagataaaactgaccaaggtccccttgatgcttctgcagaaacaaactctaatagtcttgttaacgcggatgataaaaaaagaagcgattctagtcagtctgctataggctcttcggacaacaaggcagaagcagaaaaccaggtagatgataaatcaactgatcattcgaaatcaactgatcattcgaaaccaactgaccagcccaaaccatcaccatctaaagttgatacggcacctgcttcttcattgtcgaaacaactgccagaggcaagaactcctattcagtcgttgtccccttacgtatcagatttagatttgagtgagatagatatcccttctgtcaacacatacgcggcatatgtagagcattggagtggtaaaaatgcctatacccaccatcttttatctcgccgttatggtattaaagctgaccagattgatagttacttaaaatcaacaggcattgcctatgacagcacacgtattaatggtgagaagctattgcaatgggaaaagaaaagtgggctggatgttcgagctatcgtagctattgcgatgtctgagagttctttaggaactcaagggattgcaactttgcttggagctaatatgtttggctatgcagcttttgatctagatccgactcaagcaagtaagtttaatgatgatagtgctattgtcaaaatgacacaagacaccattattaaaaacaaaaatagcaattttgcacttcaagatttaaaagcggctaagttttcacgaggtcaattaaactttgcaagtgacgggggtgtttattttactgatactactggtagtggtaaacgtcgcgcacaaattatggaagacctggataagtggattgatgaccatggtggcacaccagccattccagccgaattgaaagtgcagtcatcagctagttttgcatctgtgccagcaggttataagctctctaagagttatgatgtcttgggttatcaagcttcgagttatgcttggggacaatgcacttggtatgtgtataatcgcgccaaagaattgggttaccaatttgatccttttatgggaaatggtggagattggaagtataaagtagggtatgccctttcaaagactccaaaagtaggttatgctatttcatttgcaccagggcaagcgggcgctgatggcacttatggccacgtatcaattgtagaagatgttagaaaagatgggtctattcttatttcagagtctaactgtatcggcttaggtaagatttcttatcgtacctttacagctcagcaggctgaacagctaacatatgttattggcaagagtaaaaactaa

SEQ ID NO: 208 - protein, 503 aa, Streptococcus pyogenes
MNKNKLLRVAMLLSLLAPTAESMTVLAQDVMLETHKATTNETSDSSSKEENNKNAAPTTSDKTDQGPLDASAETNSNSLVNADDKKRSDSSQSAIGSSDNKAEAENQVDDKSTDHSKSTDHSKPTDQPKPSPSKVDTAPASSLSKQLPEARTPIQSLSPYVSDLDLSEIDIPSVNTYAAYVEHWSGKNAYTHHLLSRRYGIKADQIDSYLKSTGIAYDSTRINGEKLLQWEKKSGLDVRAIVAIAMSESSLGTQGIATLLGANMFGYAAFDLDPTQASKFNDDSAIVKMTQDTIIKNKNSNFALQDLKAAKFSRGQLNFASDGGVYFTDTTGSGKRRAQIMEDLDKWIDDHGGTPAIPAELKVQSSASFASVPAGYKLSKSYDVLGYQASSYAWGQCTWYVYNRAKELGYQFDPFMGNGGDWKYKVGYALSKTPKVGYAISFAPGQAGADGTYGHVSIVEDVRKDGSILISESNCIGLGKISYRTFTAQQAEQLTYVIGKSKN

SEQ ID NO: 209 - DNA, 876 bp, Streptococcus pyogenes
atgacaaaggtagtaataaagcaattgttgcaggtaatagtagtgttcatgataagtttatcgacaatgacaaatcttgtgtatgcagataaaggtcaaatttatggatgtattattcaaagaaattatcgtcatccgatatctgggcagatagaagatagcggaggggagcattcctttgatattggtcaaggtatggttgaaggaactgtctatagtgatgccatgctagaagtatctgatgctggaaagatcgttcttacttttcgtatgagcttagctgattattcgggcaattatcagttctggatacaacctggaggaactggaagctttcaggcagttgattacaatatcacccaaaaaggtactgataccaatgggacaacactagatattgctattagtttgcctactgtaaatagtatcattcgaggcagcatgtttgttgaacctatgggcagagaagtggtcttttacctgtcagcttcagagttaatacaaaagtattcaggtaatatgttggcccagcttgttactgaaacagacaattctcaaaatcaagaagtaaaagacagtcaaaagcctgttgatacaaaactaggagaaagtcaagatgagtctcacacaggtgctatgataactcagaataagcctaaagccaactcatcaaataacaagagtctatcagataaaaaaattcttccttctaagatgggcttaacgacttctttagagttaaaaaaagaagataagtttcggtctaaaaaagacttatcaatcatgatttactactttccaactttttttctgatgttaggagggtttgctgtatgggtttggaaaaagaggaaaaaaaatgataaaacgatgtaa

SEQ ID NO: 210 - protein, 291 aa, Streptococcus pyogenes
MTKVVIKQLLQVIVVFMISLSTMTNLVYADKGQIYGCIIQRNYRHPISGQIEDSGGEHSFDIGQGMVEGTVYSDAMLEVSDAGKIVLTFRMSLADYSGNYQFWIQPGGTGSFQAVDYNITQKGTDTNGTTLDIAISLPTVNSIIRGSMFVEPMGREVVFYLSASELIQKYSGNMLAQLVTETDNSQNQEVKDSQKPVDTKLGESQDESHTGAMITQNKPKANSSNNKSLSDKKILPSKMGLTTSLELKKEDKFRSKKDLSIMIYYFPTFFLMLGGFAVWVWKKRKKNDKTM

SEQ ID NO: 211 - DNA, 1050 bp, Streptococcus pyogenes
ttgaccacgtgggagatcatccgtaacatgacagcatcagatttacaaagggatcaatccctactggctaaaaaacgtttcagaagtggtctttatctagttcttttaattctcagcctcctatttttggcggttattgccttatcccttggtggtttggcggtttcttatggggcaattgtcaagggactgtttgtggcttatgacccccaagtggctttgatttatgatttgcgttttccaagaattgtcattgctttattagcaggagcagggatagctgtttcgggagttctttttcaagcagtgttgaaaaatcctatttcagaccctgctattatagggatttgtagtggtgctagttttatggttttagtctctagtttacttctgccgcagttgctgctgtatggtccaatcgtatcctttttaggaggcggagtgtctttcctgctgatttatggtttagcatggaagaaagggcttaatcctattcggcttattctaacagggattgctattaatgctttatttatggggttatcaactgctttaaccagctttttcacctcagctagtcccatggtcaatgctcttttagcaggtcatattagtcaaaaaacatgggctgatgtaggggttttattcccttatacattcattggcttgttactagctttgttattgtcaaaaacttgtaaccttcttcttttagatgatcaggtgattcgtcatttaggaatcgatgctacagcgttacggttgggaatttccttggttgctgttttattggcttcggtagccacttcgatcgttggagtggtttctttcctaggcttgattgtccctcatatgagccgcttgctggttggaagtaagcaccaaatcttaattcctttttcagctttgcttggagcctttgtctttttgctagccgatactttaggaagaagtcttgcttacccattggaaattagccctgcgattataatgagtattgtaggcgggccttactttatttacctgctaaggaggtctgatattatatga

SEQ ID NO: 212 - protein, 349 aa, Streptococcus pyogenes
MTTWEIIRNMTASDLQRDQSLLAKKRFRSGLYLVLLILSLLFLAVIALSLGGLAVSYGAIVKGLFVAYDPQVALIYDLRFPRIVIALLAGAGIAVSGVLFQAVLKNPISDPAIIGICSGASFMVLVSSLLLPQLLLYGPIVSFLGGGVSFLLIYGLAWKKGLNPIRLILTGIAINALFMGLSTALTSFFTSASPMVNALLAGHISQKTWADVGVLFPYTFIGLLLALLLSKTCNLLLLDDQVIRHLGIDATALRLGISLVAVLLASVATSIVGVVSFLGLIVPHMSRLLVGSKHQILIPFSALLGAFVFLLADTLGRSLAYPLEISPAIIMSIVGGPYFIYLLRRSDII

SEQ ID NO: 213 - DNA, 1764 bp, Streptococcus pyogenes
atgatggaaacagaagatacaatatcaaggggaaaaaggaaaagactgttaaaacgattacgtgaacgaattgcaccaaaaaggtatttgctttatgtgtcagcctttttatcttggttacaatttgtgatgaggatgatcagtttttacctcattgccaaaacgttttcgacctttattttgggtcatgctattgccttaggacgcttggcaggtttactcctacttttaaatgtggtaggctttgttcttgctatattaggcaagcaactgcaagggatcgcttcacaatttgctagagattcactcaaacaatctttctttgaggcttttattgatttagacgggcaatttgatgctcatgccagtgatgctgatattttaacgttggcttcacaggggattgatagtttggatacttattatggttactatttgtctttgtctatgagaaccaagtggaactgcacaactattatgatactagtctttttaatttatccattggcaggccttgtctttttaggagttctgcctctgattccactttcaatcgttgctatgcaaaagcggtctcagccaaacatgagtcattattggtcctcttatatggatgttggtaatttatttatggatgacttaaaaggtcttaatacactgtattcttatcaagcaacagaacgttacgagcaagaattttcgggtaaggcagaacagtttcgaaaggctaccatgtctttgcttggctttcagttacaagcagttggttatatggatgcagttatgtatctgggaattggtttgtcaggttttttagccgttcaagctttggcaacaggccagttatctttttttaatttcctattttttctcttgattgctacagaattttttacaccgattcgtgagcagggttatggcatgcacttggtcatgatgaataccaaaatggctgaccgtatctttagtttcttggatagtgttccagcaagaaaagataacaagagtaaaacagcaataaactttaaccagattgacatccaaaatatttctttagcttatgagaaaaaaacagtgcttagtggggttaccatgacattaacgaagggccaactaacagctatcgcgggggtgtcaggacaaggaaaaacaagtctagctcaactcctcttgaaacgccagtctgcaacgactgggcatattttatttgacggtttagacagtgacaatttgtcgcaagaaactatcaaccagcaggttctttatgtatcggaccaatctaccttattgaaccgtagcatttacgataatttaaggttagcagcaaatctctctaaaaaagaaatcttagattggatagatcaacatggtttgttaagcttcatcaactggctaccagatggtcttgacacaatagttggtgaaaatggtaacctgttatcaccaggccaaaagcaacaggtgatttgcgcaagagctctattaagtaagaggtctctttatatctttgatgaggcaacatctagtctagatgcagaaaatgaacgtattattgacaatttaataacgagattagctaagacagcaatagttattgtgattactcataagatgtctcgactgaaaggagctaaccaagtactctttttaaacacagggcagcctgcttgtttaggcaaaccttgcgacctttatcgggaccaaccaacttatcgtcacctagttgatactcaagcaagactggaggcaagtatttatggctaa

SEQ ID NO: 214 - protein, 587 aa, Streptococcus pyogenes
MMETEDTISRGKRKRLLKRLRERIAPKRYLLYVSAFLSWLQFVMRMISFYLIAKTFSTFILGHAIALGRLAGLLLLLNVVGFVLAILGKQLQGIASQFARDSLKQSFFEAFIDLDGQFDAHASDADILTLASQGIDSLDTYYGYYLSLSMRTKWNCTTIMILVFLIYPLAGLVFLGVLPLIPLSIVAMQKRSQPNMSHYWSSYMDVGNLFMDDLKGLNTLYSYQATERYEQEFSGKAEQFRKATMSLLGFQLQAVGYMDAVMYLGIGLSGFLAVQALATGQLSFFNFLFFLLIATEFFTPIREQGYGMHLVMMNTKMADRIFSFLDSVPARKDNKSKTAINFNQIDIQNISLAYEKKTVLSGVTMTLTKGQLTAIAGVSGQGKTSLAQLLLKRQSATTGHILFDGLDSDNLSQETINQQVLYVSDQSTLLNRSIYDNLRLAANLSKKEILDWIDQHGLLSFINWLPDGLDTIVGENGNLLSPGQKQQVICARALLSKRSLYIFDEATSSLDAENERIIDNLITRLAKTAIVIVITHKMSRLKGANQVLFLNTGQPACLGKPCDLYRDQPTYRHLVDTQARLEASIYG

SEQ ID NO: 215 - DNA, 1704 bp, Streptococcus pyogenes
ttgatactcaagcaagactggaggcaagtatttatggctaaacctaacagatctaccttaagcctggtttggcgtttattaaccctaatgaaaactctgctaccttggattatcttggctgttggctttgctgttatgggttttgtcatcacggtaagtattccaactggaatagcttatttaggactactagctattagacaagaagtgattccaatattagctttatatcttttgattgctctagcctttttaagaggttttgttcgttatggagagcattattttggtcattttgttgcttttcatagtttagcagcttttaggaacttgatctttaagaaactaagagctctttctccagcttgcttggatagtcaagacagtggttatttgcttaaaatgattggagaagatattgaggcattagaagttttttttgcccacacaatcgcacctatttgtacagcaatattgtctgcaggtttaatgttctggtacttttgtcaaagtagttggcagttagccttattagctttggcaacctatgcttgtttagccattgttatacccatttattttgctaatattttacaggttttactaaaaagccaaaatgaaggtcgaaaagattacctgtcttattttttagagagtttacgatcagtcaaagatcttttgcaatttcaggtattagacgagcaatttgaacgattaataaaaaaaagtaatcatgtaaatgctcttgatcgtaacgtagcgcaagcccaatttttgcaaatggcattgacttttttctggcttggcttaatgatcttagcattttcttatatggtttttgatgggatatgccatgacagcttatcatttgataaaggcttattaacttttattgctttcactgcttcgttttctccttttttagaactaggacgtttgccattaggttttaagcgtgctatgaatgcggctcgaaatatttttgaccttctagacgaaaatgtcatagtagatgaaggcacaaaacaaatagatcgtttaaggagtgtttcttttgaggacctcagttttgcttatccaaagcgccaagagctggtttttaaggatttaacagttacctttcaagaaaaggggattattggcattaaaggcgaatcaggatctggtaaatcaactttggtgaaattaattatgaaatggtataattggaagacaggagatatttttcttaatgataggaatagttgcttactaaatgctgctaaattacaagatactattgcttatgtgccacaaacagcgcagcttttccaacagtctatccgtgaaaatcttatctttggccgtcaagatatttcagatgagtccatttggaatttagctgaggcttgtggtatgaaagacagactgttagcttgtaaggaaggtttggatacgattatcaagagtccttctgacttttcagctggagaaggtcaacgtttagagttgatgcgagctttattgaaagatgcgagttgctatatttttgatgaacccacgtcaaatttagattctctaaatgaagctatcttgcttgatttaattaaaacacattgtcaaggattggtcttcttaatttctcacaggccatcaaccctagcttgtgttgatcatctattttgcgtaaaaaatggttccctaaaagaggtgaataaaaaatga

SEQ ID NO: 216 - protein, 567 aa, Streptococcus pyogenes
MILKQDWRQVFMAKPNRSTLSLVWRLLTLMKTLLPWIILAVGFAVMGFVITVSIPTGIAYLGLLAIRQEVIPILALYLLIALAFLRGFVRYGEHYFGHFVAFHSLAAFRNLIFKKLRALSPACLDSQDSGYLLKMIGEDIEALEVFFAHTIAPICTAILSAGLMFWYFCQSSWQLALLALATYACLAIVIPIYFANILQVLLKSQNEGRKDYLSYFLESLRSVKDLLQFQVLDEQFERLIKKSNHVNALDRNVAQAQFLQMALTFFWLGLMILAFSYMVFDGICHDSLSFDKGLLTFIAFTASFSPFLELGRLPLGFKRAMNAARNIFDLLDENVIVDEGTKQIDRLRSVSFEDLSFAYPKRQELVFKDLTVTFQEKGIIGIKGESGSGKSTLVKLIMKWYNWKTGDIFLNDRNSCLLNAAKLQDTIAYVPQTAQLFQQSIRENLIFGRQDISDESIWNLAEACGMKDRLLACKEGLDTIIKSPSDFSAGEGQRLELMRALLKDASCYIFDEPTSNLDSLNEAILLDLIKTHCQGLVFLISHRPSTLACVDHLFCVKNGSLKEVNKK

SEQ ID NO: 217 - DNA, 777 bp, Streptococcus pyogenes
ttggtttgtaggaattgttcttgcaggagccttattagggtcagtttttgcacattatttactaaagaaacattttatcaaatcaggattgttatcatgaggcttgatgttcgcaccaaactgcttttgttggtacttgccaatgcctgcttcttttttcgtgttgatggctttttagaatttataattgttatttttctcttattacttttgtctgctttaaataagaaaaagctagcgttcaagttggcggttgtttatctgttaatgatcggtctatctgtaatcccgctatcgattttcccttcttatcttgaccacttattgagttttgtctcaatagcaggaaggttagttttcccttctttactagcaggtttaattactattaagacaactaccatctacgaattggttcatggattacgcaaatggcgtttcccagaagtctggctattgaccttggccgttatgtgccgtttcataccaatgattagacaagaatgttgtgttattcatcgctctttaaaaatcagggggattattttaacaaaatggtctattttgatcagacctaaacaatacttggagtatttaatggttccattgcttttatctttgataagaagtagccaagaactaactatcgctagtctaactaaagggctagcagtcaacaaaggcaccagtgaatgctttagctcacacttaacatggaaagattggggggtgcagatttggattactgttatcataatcatcacgatactgcaatga

SEQ ID NO: 218 - protein, 258 aa, Streptococcus pyogenes
MVCRNCSCRSLIRVSFCTLFTKETFYQIRIVIMRLDVRTKLLLLVLANACFFFRVDGFLEFIIVIFLLLLLSALNKKKLAFKLAVVYLLMIGLSVIPLSIFPSYLDHLLSFVSIAGRLVFPSLLAGLITIKTTTIYELVHGLRKWRFPEVWLLTLAVMCRFIPMIRQECCVIHRSLKIRGIILTKWSILIRPKQYLEYLMVPLLLSLIRSSQELTIASLTKGLAVNKGTSECFSSHLTWKDWGVQIWITVIIIITILQ

SEQ ID NO: 219 - DNA, 744 bp, Streptococcus pyogenes
atgaaatataattcgttaaactatttagtgcaattgctaattgttattgtttttttaggagggctttacctctttataaaaccagaagagtcagtaacaccaactcagttgaataaaaaagaaatccaacaaaaagatatcaaaaaaacggaccgtttacgagctttacctaaggtatctgttgaagattgggagttggttttagtaaaccgcgatcacattacaaaagaaatgagtcctgaattagctgacattaatggtatttctgtggataaacgcattgagcaagccactagtgactttttagcagcagcacaagctatcgacttgcaagaacatcttatctctgggtaccgttccgtagactaccaaacagagctttaccaatcttatattaaaaaagagatggctaacgatccaacattgacacaagaagctgcggaggctttggtgcaaacctattcacagccgccaggggctagtgaacatcacactggtcttgctattgacatgagcactgtagatactttaaatgccagtgatccatcagtagctaaagcagttcaaaaaattgcacctgattatgggtttgtcttgcgctttccagaaggaaaaaagactagtacaggggttgattatgaggattggcattaccgctatgtaggcaaggcgtctgctcgttatatggctcagcacaacctaacgttggaagagtacattgctgctttaaaggagaaacgatga

SEQ ID NO: 220 - protein, 247 aa, Streptococcus pyogenes
MKYNSLNYLVQLLIVIVFLGGLYLFIKPEESVTPTQLNKKEIQQKDIKKTDRLRALPKVSVEDWELVLVNRDHITKEMSPELADINGISVDKRIEQATSDFLAAAQAIDLQEHLISGYRSVDYQTELYQSYIKKEMANDPTLTQEAAEALVQTYSQPPGASEHHTGLAIDMSTVDTLNASDPSVAKAVQKIAPDYGFVLRFPEGKKTSTGVDYEDWHYRYVGKASARYMAQHNLTLEEYIAALKEKR

SEQ ID NO: 221 - DNA, 570 bp, Streptococcus pyogenes
atgagaaaacgactaaagtttccgtattttttaacgcttctagcttgctttttattgctgattgtttgtcccttactgagtagccaaaggatagctagtgcagataaagaagtaagggtgaactacagccaaaaacaatttattacaaaaatgggtaaagaagttaaaccattggcaaaatattatggcattagaccatctattttgattgctcaaattcttttggaaacccatgatggaaaaacattactagcgtctaagtatcataatctttttagcaagaaagcaactccaggacaagtggccattaccctaaagtcccctaaacaaaccaaccaaaacgtgagatatgctatttataaagatgacgctagtgcaattagagattatttacgaatgcttcggcagggaaaagaagtcgataagcgtttgtatcgtaatcttgctacagaaaaagggtataaagcaccagctaaaagtttacaaaagtatttgcattatactgataaaacctatgctaggcgactaattcaggtcattgaaagtaacgatttaacaaactatgactga

SEQ ID NO: 222 - protein, 189 aa, Streptococcus pyogenes
MRKRLKFPYFLTLLACFLLLIVCPLLSSQRIASADKEVRVNYSQKQFITKMGKEVKPLAKYYGIRPSILIAQILLETHDGKTLLASKYHNLFSKKATPGQVAITLKSPKQTNQNVRYAIYKDDASAIRDYLRMLRQGKEVDKRLYRNLATEKGYKAPAKSLQKYLHYTDKTYARRLIQVIESNDLTNYD

SEQ ID NO: 223 - DNA, 912 bp, Streptococcus pyogenes
atgactgaacaaattaaattaactaaatcagaccgtcaacgtgtttggtggcgttcacaattcttacaaggttcttggaactacgaacgtatgcaaaacatgggctgggcttatgcacttatccctgctcttaaaaaattgtatacgtctcctgaagaccgtgcagctgctcttgagcgccacatggaattctttaacactcacccatacgttgcagctccaatcattggtgtaacacttgcccttgaagaagaacgcgcaaatggtacgccaattgatgacaaggctatccaaggggttaaaatcggtatgatgggacctcttgctggtatcggtgacccagtattctggtttacgattcgtcctatccttggggcacttggtgcttctttggcttcaacaggtaacatcgttggtccacttctgttcttctttggatggaaccttatccgtatggccttcttatggtatactcaagaatttggttacaaagctggttctgaaattactaaagacatgtcaggcggtatcctccaagacattactaaaggtgcttcaatccttggaatgtttatccttgcagtgcttgttcaacgttgggtatctatcaactttactatcgaccttcctggaaaacaattgtcagatggtgcctatgtggtcttcccagatggcgctgttaaaggtgctgaattgaaaactatccttgccaacgctattggtggtatgagccttgataaagtccaagctcaaacccttcaaggacaattggactctcttatcccaggtttagctggattactccttacattcctttgcatgtggttattgaagaaaaaagtttctccaatcgcaatcatcatcggcttgtttgcatttggtatccttgctcaccttgcaggtattatgtaa

SEQ ID NO: 224 - protein, 303 aa, Streptococcus pyogenes
MTEQIKLTKSDRQRVWWRSQFLQGSWNYERMQNMGWAYALIPALKKLYTSPEDRAAALERHMEFFNTHPYVAAPIIGVTLALEEERANGTPIDDKAIQGVKIGMMGPLAGIGDPVFWFTIRPILGALGASLASTGNIVGPLLFFFGWNLIRMAFLWYTQEFGYKAGSEITKDMSGGILQDITKGASILGMFILAVLVQRWVSINFTIDLPGKQLSDGAYVVFPDGAVKGAELKTILANAIGGMSLDKVQAQTLQGQLDSLIPGLAGLLLTFLCMWLLKKKVSPIAIIIGLFAFGILAHLAGIM

SEQ ID NO: 225 - DNA, 810 bp, Streptococcus pyogenes
atgtcagatatttcgattatttctgcaattttggtcgttatcattgccttcttcgctggtcttgaaggtatcctcgaccaatttcaaatgcaccaaccacttgttgcctgtactttgattggacttgtaactggacaccttgaagctggtgtcatccttggtggtacacttcaaatgcttgctcttggttgggcaaacatcggtgctgccgttgcccctgatgctgcccttgcctctgttgcagctgctatcatcatggtcaaaagtggcgactttactcaaaaaggaattacctttgcttactcaacagctatcccacttgctgttgctggtcttttccttacaatgatcgttcgtactttgtcaactgcccttgtacacgctggtgacaaagctgccgctgaaggtaatttcgcaggtattgaacgcttccactttattgcccttcttcttcaaggattgcgtatcgctgtccctgcagctcttcttgttgctgttcctacttcagccgtacaatctgttttgaatgctatgccaaactggttgaacgaaggtatgcaaatcggtggtgcgatggttgttgctgtaggttatgctatggttatcaacatgatggctactcgtgaagtatggccattcttcgccctaggttttgctcttgcagctatcagccaattaacccttatcgctatgggtgttatcggtgtagcaattgccttcatctaccttaatctttctaaaaaaggtggtaacggtggtaatgcagcaggttcagctgatccaatcggcgacatcttagaagactactag

SEQ ID NO: 226 - protein, 269 aa, Streptococcus pyogenes
MSDISIISAILVVIIAFFAGLEGILDQFQMHQPLVACTLIGLVTGHLEAGVILGGTLQMLALGWANIGAAVAPDAALASVAAAIIMVKSGDFTQKGITFAYSTAIPLAVAGLFLTMIVRTLSTALVHAGDKAAAEGNFAGIERFHFIALLLQGLRIAVPAALLVAVPTSAVQSVLNAMPNWLNEGMQIGGAMVVAVGYAMVINMMATREVWPFFALGFALAAISQLTLIAMGVIGVAIAFIYLNLSKKGGNGGNAAGSADPIGDILEDY

SEQ ID NO: 227 - DNA, 1461 bp, Streptococcus pyogenes
atggaaaagttttttaagttaagcgaaaatgggacaactgtctcaactgagattatggctggtttaacgaccttttttgccatgtcctatattttgtttgttaacccaagtattttaggtgcagcggggatgccctctaatgctgtctttttggctacgattatcgcagcagccatatcaaccttaattatgggactatttgccaatgtgccttatgcgttggcaccaggaatgggacttaacgcttttttcacttatacagttgtttttgctttaaggttttcatggcaagaagccttggcaatggttttcatttgtggattattcaatatttttattaccgtaaccaagtttcgtaaaagtatcatcaaggcgattccagttagtttacagcatgctattggtgggggaattggtgtctttgtagcttatttaggatttaaaaacgcaaatatcattactttttctatctctgctgaaaatatagtaatggtaaatggtgttgaaccggctaaagcatcggctaaaacatttgcagatggtctattatttgtagacgccaatggtggagttgtacctacgatttctagttttacggattccggtgtattacttgctatttttggtttacttttgacgacagctcttgtgattcgaaattttagaggtgctattttaattggtattgtcgcaacaactcttgtaggtgttcctttaggaatagtggatgtgtccaacctcaattttgggatcagccatattggtgaagcttggactgaattaggtacaactttccttgcagctttcgatggtttgagttctctttttagcgattcaagtcgtttaccgctagttttcatgactatttttgcttttagtctatcagatacttttgacacaattggtacctttatcggaactggtcgtcgaacaggtattttctctcaagacgatgagaatgctttggaaaatagtataggctttagttcaaaaatggaccgtgcgctttttgcagatgctatcggtacttctattggggctttggttggaacttcaaatacgactacctatgttgaatcagcagcaggaattgctgaaggtggacgtactggactaacagcagtctccaccgcagtatgcttcttattatcaatattgctattaccgcttgtaggtattgtcccagctgctgctacggctccagctttaattattgtgggtgtcatgatggtgtcttcttttcttgatgttaattggagtaaatttgcagatgctcttccagctttttttgcagctttctttatggcgctgtgttactctatttcctatggtattgccgctgcctttattttctattgtctagtaaaagttgttgagggaaaaacaaaagatattcaccctattatttggggagcaaccttcttgttcattgtaaatttcatcatattaactatcttataa

SEQ ID NO: 228 - protein, 486 aa, Streptococcus pyogenes
MEKFFKLSENGTTVSTEIMAGLTTFFAMSYILFVNPSILGAAGMPSNAVFLATIIAAAISTLIMGLFANVPYALAPGMGLNAFFTYTVVFALRFSWQEALAMVFICGLFNIFITVTKFRKSIIKAIPVSLQHAIGGGIGVFVAYLGFKNANIITFSISAENIVMVNGVEPAKASAKTFADGLLFVDANGGVVPTISSFTDSGVLLAIFGLLLTTALVIRNFRGAILIGIVATTLVGVPLGIVDVSNLNFGISHIGEAWTELGTTFLAAFDGLSSLFSDSSRLPLVFMTIFAFSLSDTFDTIGTFIGTGRRTGIFSQDDENALENSIGFSSKMDRALFADAIGTSIGALVGTSNTTTYVESAAGIAEGGRTGLTAVSTAVCFLLSILLLPLVGIVPAAATAPALIIVGVMMVSSFLDVNWSKFADALPAFFAAFFMALCYSISYGIAAAFIFYCLVKVVEGKTKDIHPIIWGATFLFIVNFIILTIL

SEQ ID NO: 229 - DNA, 1035 bp, Streptococcus pyogenes
atgaaagcattatttctgaaacgccgtcaagactttcaaaaacaacaaaacaaataccttcgttacgtcttaaatgatcactttgttttggtgttgatgtttttattaggctttgctatggtgcagtatggtcagctactaaaccattttccaacgaatcatctacctattcaggtttgccttgggatattgatcccattattgctcagtatgggatctatagcaacgtatctagaagaggcagatcagcatttcttacttccaaaagaagaagaagtgatttcttatatcaaacaagctgagcgactctcttttttgctttggggaactttgcagactgctgtattgctctttttatatcctatttttagacgtttaggtctgtctttatttatttttattatcttagttttgatattattggcactaaaaagagtagtgcttagtcgaaagacaagatattttttgagaggaaatcgtttagattgggcaaaagctgtcgcatttgaaagcaatcgcaagcaaagtattttaaagttttattctctttttacaacagtcaaaggaatttctacaaaagtgaaagaaagaacttatctaaatcctcttttaaaattagttaagcaaactccttcaaacctttggctgtccctttatgctagagcctttttacgtagttcagattatttgggcttatttttacgactaatgctattaagctcattatctgtattttttatccataatctttatttgtcagtaagtttagcactcatttttaactatttagttgtattccaattactttccctttattatcactacgattaccattatatgactagtctttatcctgaaaatagtcggagcaagaagaaaaatatgttaagttttttacgaggtttaagctttttaatgttaatcgtcaatatgctgtgttgctcatcagcgccaaaagcactcattttgattgtaggtatggttttcatagcttgtatatatctaccttataagttaaagaagatcattgactaa

SEQ ID NO: 230 - protein, 344 aa, Streptococcus pyogenes
MKALFLKRRQDFQKQQNKYLRYVLNDHFVLVLMFLLGFAMVQYGQLLNHFPTNHLPIQVCLGILIPLLLSMGSIATYLEEADQHFLLPKEEEVISYIKQAERLSFLLWGTLQTAVLLFLYPIFRRLGLSLFIFIILVLILLALKRVVLSRKTRYFLRGNRLDWAKAVAFESNRKQSILKFYSLFTTVKGISTKVKERTYLNPLLKLVKQTPSNLWLSLYARAFLRSSDYLGLFLRLMLLSSLSVFFIHNLYLSVSLALIFNYLVVFQLLSLYYHYDYHYMTSLYPENSRSKKKNMLSFLRGLSFLMLIVNMLCCSSAPKALILIVGMVFIACIYLPYKLKKIID

SEQ ID NO: 231 - DNA, 987 bp, Streptococcus pyogenes
ttgaaacatcctattcgaaaaacacttgtcaccttaggtctattactgaccttatgcctgccgactccagttgcagctagttctcgttcttggaagagctggtttatcgagcaatatttctggttaaaacgtgacaagagttactattctaaacaagatgacccaagcttccaaagataccttgatgcctgtcgtgaacaatctgataaaccttatcaactagatactaatttagtcaatggtccccttgttcaagaaaatctttatggcatgcaggtttactcttggaatgataatggaaaacctgatcaaaaaacaattatttatcttgccggtggttcttatcttaacaatccaacgacataccatattaatatgttaaagacattatccacaagtcttgacgctaaaattgttttacccatttatcctaaagccccacgttatacctataactatactatgccaaaattggtcaatctttaccaacactattaccataaaaatcagaatgttttccttatgggagattcagcaggtggaggtttagccttaggtctagctcatgccctacacaatgaatcagtccctcaaccaaagcagctcgttcttttatcaccttggttagatgttactatgtcacacccagagattccagaatacgaagatgctgatcctattctatcttcttggggattaaaacgagtgggagaattgtgggcctactctgctgataataccaaccatatttatgtcagtcctaaaaatggtccgatcacttatctaccaccaattactttatttactgggacacgagagatcttttatcctgatattcgcgattatgccgcaaaactgaaagccgctaaccacaatattacctttattacccaagaaggcatgaaccacgtttacccaatttatcctatcgaagaggcaaaaacagctcaataccaaatcattgatgccatcaacaaaactccttaa

SEQ ID NO: 232 - protein, 328 aa, Streptococcus pyogenes
MKHPIRKTLVTLGLLLTLCLPTPVAASSRSWKSWFIEQYFWLKRDKSYYSKQDDPSFQRYLDACREQSDKPYQLDTNLVNGPLVQENLYGMQVYSWNDNGKPDQKTIIYLAGGSYLNNPTTYHINMLKTLSTSLDAKIVLPIYPKAPRYTYNYTMPKLVNLYQHYYHKNQNVFLMGDSAGGGLALGLAHALHNESVPQPKQLVLLSPWLDVTMSHPEIPEYEDADPILSSWGLKRVGELWAYSADNTNHIYVSPKNGPITYLPPITLFTGTREIFYPDIRDYAAKLKAANHNITFITQEGMNHVYPIYPIEEAKTAQYQIIDAINKTP

SEQ ID NO: 233 - DNA, 1452 bp, Streptococcus pyogenes
atgatgcaaccttttttagacattattaacaagattctgggatttcctattcagttgggatcaggtgtggtcatgctgattgtcatgacaggtttagccatgattttcggggttaaattcacaaaggcactggaaggtgggattaagttagccatcgctttgacagggattggagccattattggaattttgacgggggctttttcagagtctttacaggcctttgttaaaaatacagggatcagtttaaacattattgatgtcggttgggcaccgcttgcaacaattacctggggttccccttacaccctttatttcttgctggtgatgctggtggttaatattgtcatgattgtcatgaaaaaaacggacacccttgacgtcgatatttttgatatttggcatttgtccattacgggtctattgattatgtggtatgcggctcgtaaccatttaccagtctttgtgtctcttttgattgctactgtggcagttattcttgttggggtactgaaaatcattaactctgatttgatgaaaccgacctttgatgaccttcttgggacagggcctcaatcaccaatgacttcaactcacatgaactacatgatgaatccaatcattatggtcttagataagatttttgacaaggtctttccggggctggataaatatgactttgatgctgctaaattgaacaaaaaaattggcttctggggctctaagttctttatcggaatggctctaggttttgtgattgggattatgggagatcctcatttcactgttgaatctatcaaaaattggtttggcctaggctttaccgcgggtgcctgcttggaacttttctctttgattggctcttggtttatcgcagctgttgagcctttgtcacaagggattaccaattttgccaatgctagaatgcatgggcgtcgtttcaatatcggtttggactggcccttcattgctggtcgtgctgaaatctgggcctgtgccaatattcttgccccaatcatgttgattgaagccgttctcctatcaaaagttggcaatgggattttaccactggcaggaattattgctatggggatgacaccagctcttcttgtggtcacacgtggtcgtttgattcgcatgattatttttggttccctcttattgccattattcctcttgtcaggaactatgattgctccatttgcgacagagttggctaaaaaagtaggggcttttccagcaggtacaagcgctggttccttgattacgcattcaacacttgaaggaccaatggaaaaaatttttggttatgtgattggtcaagcgacaacaggtcagattgcctcaatcatcacgctaatcatctttgtggccatttacctaagtctctttgcttggtatgctaaccaaatgaaggcacgtaacgctgaatatgcgaaaacaatgaaataa

SEQ ID NO: 234 - protein, 483 aa, Streptococcus pyogenes
MMQPFLDIINKILGFPIQLGSGVVMLIVMTGLAMIFGVKFTKALEGGIKLAIALTGIGAIIGILTGAFSESLQAFVKNTGISLNIIDVGWAPLATITWGSPYTLYFLLVMLVVNIVMIVMKKTDTLDVDIFDIWHLSITGLLIMWYAARNHLPVFVSLLIATVAVILVGVLKIINSDLMKPTFDDLLGTGPQSPMTSTHMNYMMNPIIMVLDKIFDKVFPGLDKYDFDAAKLNKKIGFWGSKFFIGMALGFVIGIMGDPHFTVESIKNWFGLGFTAGACLELFSLIGSWFIAAVEPLSQGITNFANARMHGRRFNIGLDWPFIAGRAEIWACANILAPIMLIEAVLLSKVGNGILPLAGIIAMGMTPALLVVTRGRLIRMIIFGSLLLPLFLLSGTMIAPFATELAKKVGAFPAGTSAGSLITHSTLEGPMEKIFGYVIGQATTGQIASIITLIIFVAIYLSLFAWYANQMKARNAEYAKTMK

SEQ ID NO: 235 - DNA, 723 bp, Streptococcus pyogenes
atggctacgatgaaacaatatcataaaggagattccatgactaaatcacaaaaagaggcgctttattggatgttgagtgttctaactatcactctaataggtggctcctgccttatttttggatcccaccctcaaacgcaagataaggtagctaaacattctaaaagtgctgctagtttactaaaaaaagcagttaaagcagttaatgacgctgatcgtttagccactgcagctgctatccaagaagcccagaaagctgttgataaattagcagaatcttctaagaaaaaaacgctacaagaacagctaaacgttgccaaagcaaagcaagagcaagaagatgcagctactcaagcagttaaagctgctgaggagactctcaatcaaaatcttaaagatatcgcccaaaaagcagttaacgacttaagtaacaaaggtaaaaaagccgctttacaatctcggttagacgctattttaccagcgaaacccattattgatgaatttccaagacaaagtggagaaataacagataactcttactggacacctttcccaggagacgtctcagatacttatgataattcccagtcacctactttagacccaagctcagaatcttcagcttcagatgttacaccacaacctagtcatcctgatccaattccacctcagacctcttcagaaccttccgactcaggagacaagcaatcatcaaaagagtaa

SEQ ID NO: 236 - protein, 240 aa, Streptococcus pyogenes
MATMKQYHKGDSMTKSQKEALYWMLSVLTITLIGGSCLIFGSHPQTQDKVAKHSKSAASLLKKAVKAVNDADRLATAAAIQEAQKAVDKLAESSKKKTLQEQLNVAKAKQEQEDAATQAVKAAEETLNQNLKDIAQKAVNDLSNKGKKAALQSRLDAILPAKPIIDEFPRQSGEITDNSYWTPFPGDVSDTYDNSQSPTLDPSSESSASDVTPQPSHPDPIPPQTSSEPSDSGDKQSSKE

SEQ ID NO: 237 - DNA, 555 bp, Streptococcus pyogenes
ttgaaaataaggagccgtattgtgaccatctttttagtgatgttagctatgtttactattcgtttagtatttttgaagaaatcgataacaaatgaaaaagccatattagcccaaggaggacaggaatttggtgctcagaacacgaaatttttgacgttacttcacattatgatttatgtgtttgcggtgattgaagcgctgcttaaacaaattaagtttgatggcattagttttttaggtcttttgttgatgttattatcagtagctgttttatatgaagtgacacgtatcttaggtgacatttggactgtaaaattgatgttagcaaaagaccacaaatatgtggatcactggttgttcaaaacgattaaacatcctaactactttttaaatatcgcccctgagctggtgggcatagccttactttgccatgctaaaattacggctatgcttcttttcccatgctacattgtagtaatatatttacgtattcgagaagaaaacaagctattagcggaagtgattattccaaacggtactcgaacaaaaccttaa

SEQ ID NO: 238 - protein, 184 aa, Streptococcus pyogenes
MKIRSRIVTIFLVMLAMFTIRLVFLKKSITNEKAILAQGGQEFGAQNTKFLTLLHIMIYVFAVIEALLKQIKFDGISFLGLLLMLLSVAVLYEVTRILGDIWTVKLMLAKDHKYVDHWLFKTIKHPNYFLNIAPELVGIALLCHAKITAMLLFPCYIVVIYLRIREENKLLAEVIIPNGTRTKP

SEQ ID NO: 239 - DNA, 702 bp, Streptococcus pyogenes
atggatatctttggcgaatttttgggtacagccttattggttttactaggaaatggtgtggtagcaggggttgtcttgcccaaaacgaaaacccatgcttctggctggatcgtgattgcgactggctggggaattgcagttgctgtggcagtctttatcagtggcaaagttgcccctgcccacctcaatccagctgttagccttgcttttgccatgagtggaaccattgcctggtcaacagccattgcctatagccttgcccaactattgggagctatggttggttcaactctggtattccttcagttcaggccacattatctggctgctgagagtcaggctgatattttagggacatttgcgacaggtcctgctattcgagatactagctcaaacctattgagtgaaatctttgggacctttgtcttgatgcttggtattttggcatttggcttatatgatatgccagcaggactaggaaccctctgtgtaggtaccttggttattgggattgggttatccttaggaggaacgacaggttacgccattaacccagcacgtgatttaggacctcgtctagttcatgctattctaccactcaacaacaagggagattctgattggtcttatgcttggatacctgttgtaggaccaattattggagcggtcttagcagttttgcttttccaagtcatgtcctaa

SEQ ID NO: 240 - protein, 233 aa, Streptococcus pyogenes
MDIFGEFLGTALLVLLGNGVVAGVVLPKTKTHASGWIVIATGWGIAVAVAVFISGKVAPAHLNPAVSLAFAMSGTIAWSTAIAYSLAQLLGAMVGSTLVFLQFRPHYLAAESQADILGTFATGPAIRDTSSNLLSEIFGTFVLMLGILAFGLYDMPAGLGTLCVGTLVIGIGLSLGGTTGYAINPARDLGPRLVHAILPLNNKGDSDWSYAWIPVVGPIIGAVLAVLLFQVMS

SEQ ID NO: 241 - DNA, 1671 bp, Streptococcus pyogenes
ttgaactcgctgggcgtaaggcgcaagaagaggggtgatggcatgaattggtctactatttgggaacttatcaagataaacattctttattccaatccacaaagtttagctaacctcaaaaagcgtcaggaaaaacacccgaaagaaaacttcaaagcctataaaagcatgatgaggcaacaggccttaatgattgccatgtttttggtgatttacctttttatgtttattggtgtcgatttcagtcattatccaggacttttctcctttgacgttgctatgttttttatcatgtcaaccttgacagcctttagctctctttacaccattttttatgaaagtaatgacctaaaactttatattcacttaccagtaacgtcagaagaactctatattgcaaaaattgtctcgtcgctagggatgggtgctgtctttttgatgcctcttatctctcttctcttaattgcctattggcaactcttgggaaatcctttgtctattttagtagctatcgtgctctttttagtgttactagtgagttctatggtattagctatttatatcaatgcttgggtaggcaaaatcattgtaagaagtcgcaaacgaaaactcatttcaactatcatgatgtttgtctcaacttttggcgctttcgtcttaatttttgcgattaatattagtaacaacaagcgtacgatgacggatggcgtatttactgattacccaactattccctatttcaaaggattctatgatgttgttcaggcaccgttttctactgcggccctccttaacttttggttgccattgttacttatcctagctatggtatatggtattgtcacaaaagtgatgccaacttattatcgtgaggctttttatattagtaacgagaacaaagtcaagcaaactaaaaaaccagttaatcgtcctcatcagaatcaatcactggcgcagttgttgcgaaaacatcacctattaacgttacaaaatgcaactttactgacacaaacctatctcatgcccctgatgtatgtgatgctttttatcggtccaagtttgtcacgtggcacaggtttctttaagcatatttccccagattactttggggtagccttattatttggggttagtttgggtgtcatgtgtgcaacaccaaccagctttattggagtaggtatttcacttgaaaaggataactttacctttattaaaagcttaccaataacgttaaaaaaattcttgatggataaattttgcttgcttgtaggtctgcagctgattgtgcctatggtgatttatcttgtgtttggtctctttgtgttgcacctgcatcctcttctaacgattgctttttgtcttggctacgccctatcactgattgtgcaaggggaattgatgtatcgtcgtgactaccggcttctggatttaaaatggcaagacatgacgcaactctttaccagaggagatgggcaatggttaacaatgggacttatctttggtaatttaatagttgcaggtgtgctaggttttggagctgttatcattgccaatattatccaacaacctctgttgattagtattctattgagttgtctaatactaatggttttaggtcttgcgcaattatggattcaaaaaaccttctggaaaagcttagagaggctttaa

SEQ ID NO: 242 - protein, 556 aa, Streptococcus pyogenes
MNSLGVRRKKRGDGMNWSTIWELIKINILYSNPQSLANLKKRQEKHPKENFKAYKSMMRQQALMIAMFLVIYLFMFIGVDFSHYPGLFSFDVAMFFIMSTLTAFSSLYTIFYESNDLKLYIHLPVTSEELYIAKIVSSLGMGAVFLMPLISLLLIAYWQLLGNPLSILVAIVLFLVLLVSSMVLAIYINAWVGKIIVRSRKRKLISTIMMFVSTFGAFVLIFAINISNNKRTMTDGVFTDYPTIPYFKGFYDVVQAPFSTAALLNFWLPLLLILAMVYGIVTKVMPTYYREAFYISNENKVKQTKKPVNRPHQNQSLAQLLRKHHLLTLQNATLLTQTYLMPLMYVMLFIGPSLSRGTGFFKHISPDYFGVALLFGVSLGVMCATPTSFIGVGISLEKDNFTFIKSLPITLKKFLMDKFCLLVGLQLIVPMVIYLVFGLFVLHLHPLLTIAFCLGYALSLIVQGELMYRRDYRLLDLKWQDMTQLFTRGDGQWLTMGLIFGNLIVAGVLGFGAVIIANIIQQPLLISILLSCLILMVLGLAQLWIQKTFWKSLERL

SEQ ID NO: 243 - DNA, 2256 bp, Streptococcus pyogenes
atgaaaaaatggcaaaaatatgttttagattatgttgtgcgcgataggagaactccagtcgaaaatcgcgttcgagttggacaaaatatgatgctcttaactatctttattttctttattttcattattaatttcatgattattattggaacagatcaaaagtttggagttagtttgtcagaaggggcgaagaaggtttatcaagaaaccgttacgatccaagctaagcgtgggaccatttatgatcgaaatggtacagctattgcagtggattctacgacttatagcatatacgcaattttggataaatcatttgtctcggcttcagatgaaaagttatatgtacaaccttctcagtatgaaacagtagctgatattttaaaaaagcatctgggaatgaaaaaaacagatgtaattaaacagcttaagcgtaaaggacttttccaagtctcgtttggaccgtcagggtctggcatttcatatagtactatgtctactattcaaaaggctatggaagatgccaaaatcaagggaattgctttcacaactagtcctggtcgtatgtatccaaatgggacatttgcttcagaatttataggcctagcatctctaacagaagataaaaagacaggtgttaagagtttagttggaaaaacaggtctagaagcttcttttgataaaattttatcaggtcaagatggtgttattacttatcaaaaagatcgaaatgggaccacactcttgggtacaggtaagactgtcaagaaagctattgatggcaaagatatttacacaacgctatctgagcctatccagaccttcttagaaacccagatggatgtttttcaagccaaatcaaatggtcagttggccagtgcaacacttgttaatgctaaaactggtgaaattttggcaacaacacaacgccccacttataatgctgatactctgaaaggacttgaaaatacgaactacaaatggtacagtgcacttcatcaaggaaattttgaaccaggttcaaccatgaaagtgatgactctggcagcggctattgatgataaagttttcaacccaaacgaaacctttagcaatgctaatggtttgacaattgcagatgctactattcaagactggtctattaacgaaggcatttccacaggacagtacatgaattatgcacaagggtttgccttctcaagtaacgttgggatgactaaacttgaacaaaaaatgggtaatgcaaaatggatgaattatttgacgaagttccgctttggttttcctactcgttttggtttaaaagatgaagacgcaggtatatttccttctgataatatcgtgactcaagctatgagcgcttttggtcaagggatttctgtaacccagattcaaatgcttagagcctttactgctatttctaataatggtgagatgttagagccacaatttatcagtcaaatttatgatcctaacacagcaagttttagaacggcaaataaagaaattgttggaaaacctgtatcaaaaaaagccgctagtgaaacaagacaatacatgattggtgtaggaacagaccctgagtttggaacactctattcaaaaacatttggaccaattattaaagtgggtgatttacctgttgctgttaaatcaggaacagcacaaattggttcagaagatggaagtggttatcaagatggtggattgactaactatgtctattcggttgtggcaatggtgccagctgataaaccagactttttgatgtatgttactatgactaaaccacaacattttggtccccttttttggcaagatgtggttaacccagtattggaagaagcatacttaatgcaagatacactaactaagccagtagtatcagatgctaatcgtcaaacaacttataaattaccaaactttgtaggaaagaatcctggtgagacatcaagcgagttgcgtcgaaaccttgtccagccagttgtccttggtactggcagcaagatcaaaaaagtatcgcatcagcccggtcaaacgttaacagaaaaccaacaagttctcatattatcagaccgttttgtggaggtaccagacatgtatggctggacaaaatccaatgttaaaacctttgctaaatggactggaatagacatcagctttaaaggaacagattctggtcgtgttatgaaacaaagtgttgatgttggtaagtccttgaaaaaaataaaaaaaatgaccattactttaggagattaa

SEQ ID NO: 244 - protein, 751 aa, Streptococcus pyogenes
MKKWQKYVLDYVVRDRRTPVENRVRVGQNMMLLTIFIFFIFIINFMIIIGTDQKFGVSLSEGAKKVYQETVTIQAKRGTIYDRNGTAIAVDSTTYSIYAILDKSFVSASDEKLYVQPSQYETVADILKKHLGMKKTDVIKQLKRKGLFQVSFGPSGSGISYSTMSTIQKAMEDAKIKGIAFTTSPGRMYPNGTFASEFIGLASLTEDKKTGVKSLVGKTGLEASFDKILSGQDGVITYQKDRNGTTLLGTGKTVKKAIDGKDIYTTLSEPIQTFLETQMDVFQAKSNGQLASATLVNAKTGEILATTQRPTYNADTLKGLENTNYKWYSALHQGNFEPGSTMKVMTLAAAIDDKVFNPNETFSNANGLTIADATIQDWSINEGISTGQYMNYAQGFAFSSNVGMTKLEQKMGNAKWMNYLTKFRFGFPTRFGLKDEDAGIFPSDNIVTQAMSAFGQGISVTQIQMLRAFTAISNNGEMLEPQFISQIYDPNTASFRTANKEIVGKPVSKKAASETRQYMIGVGTDPEFGTLYSKTFGPIIKVGDLPVAVKSGTAQIGSEDGSGYQDGGLTNYVYSVVAMVPADKPDFLMYVTMTKPQHFGPLFWQDVVNPVLEEAYLMQDTLTKPVVSDANRQTTYKLPNFVGKNPGETSSELRRNLVQPVVLGTGSKIKKVSHQPGQTLTENQQVLILSDRFVEVPDMYGWTKSNVKTFAKWTGIDISFKGTDSGRVMKQSVDVGKSLKKIKKMTITLGD

SEQ ID NO: 245 - DNA, 855 bp, Streptococcus pyogenes
ttgcagcaatcatatcctttatggtatctgctttcacaatgcccttattttatcaaattctatcaattgaaaaaaattggtgggcaacaaatgcatgaagatgtcaagcaacatttagctaaagctggaacaccgactatggggggaactgtttttcttttagtagctacggcagtatcgttattggttagtctattttcgatcaaaaacactcaaagtttagctttgatttcaggcattttatcaattgttgtcatttacgggattatcggatttttggatgattttttaaaaatttttaagcaaatcaatgaaggattgacagccaaacaaaagttagccttgcagttggttggaggattgatgttctattttttacatgttagtccaagtggcatttcctctattaatgtgtttggttatcagctgccgctgggaattttctacctattctttgttttgttttgggtggttggtttttcaaatgccgttaatttgacagatggtatcgatggcttagcttctatctcagtggtgattagtctagtgacttacggcgttattgcctacgttcagagtcaatttgatgttttgttactgattggagcaatgattggagccttgcttggcttcttctgctttaatcacaaacctgctaaagtatttatgggagatgtaggtagtttagcccttggagctatgttggctgccatttctattgcgcttcgtcaagaatggactctcctgattattgggatcgtttatgttcttgaaacaagttctgtgatgttgcaagtgtcctatttcaagtacaccaagaaaaaatatggagaagtcgtcgtatttttagaatga

SEQ ID NO: 246 - protein, 284 aa, Streptococcus pyogenes
MQQSYPLWYLLSQCPYFIKFYQLKKIGGQQMHEDVKQHLAKAGTPTMGGTVFLLVATAVSLLVSLFSIKNTQSLALISGILSIVVIYGIIGFLDDFLKIFKQINEGLTAKQKLALQLVGGLMFYFLHVSPSGISSINVFGYQLPLGIFYLFFVLFWVVGFSNAVNLTDGIDGLASISVVISLVTYGVIAYVQSQFDVLLLIGAMIGALLGFFCFNHKPAKVFMGDVGSLALGAMLAAISIALRQEWTLLIIGIVYVLETSSVMLQVSYFKYTKKKYGEVVVFLE

SEQ ID NO: 247 - DNA, 894 bp, Streptococcus pyogenes
ttgcttattgctataatacgaatttactattttacatgtgggtctaagagtgttagaatattaagacaaacaaatacaaaggggaaatacatgacatcagtgtttttaaccagtggttgggctttttatgattacctcatctcaccgattccacatgggaaactttttagttggcatgctgtttttgatgccattccaaatattatccaacggcttccaattacgcttggtttgacactatcaggagcaacctttggcttggttttggctttgatttttgcccttgtcaaaattaataaagtgaagctactataccctattcaagctatttttgtgagtttcttgcgaggaactcctattttggtacagttgatgttgacctactacggtattcccctctttctaaaatttctcaatcagaagtatggctttgattggaatgttaatgcaattccggcttctatttttgccattacagcctttgcttttaatgaagcagcctacgctagtgaaactattcgggcagccattttatcagtagatacaggtgaaattgaagcagcaaaaagtctaggcatgacttctgtgcaggtttaccgtcgtgtcattattcctaatgcaactgttgtggctattccaaccttgattaatgggttaattggcttaactaaaggaacatcgcttgcctttaatgcagggattgtcgaaatgtttgcccaggctcaaattctaggcggatcagattaccgttattttgaacgttatatctctgttgctcttgtctattggtctatcagtattttgatggagcaagtaggtcgcttgattgaaaacaagatggccatcaaagcaccagaacaagctagaaatgaaaagttaggagaattgcgttga

SEQ ID NO: 248 - protein, 297 aa, Streptococcus pyogenes
MLIAIIRIYYFTCGSKSVRILRQTNTKGKYMTSVFLTSGWAFYDYLISPIPHGKLFSWHAVFDAIPNIIQRLPITLGLTLSGATFGLVLALIFALVKINKVKLLYPIQAIFVSFLRGTPILVQLMLTYYGIPLFLKFLNQKYGFDWNVNAIPASIFAITAFAFNEAAYASETIRAAILSVDTGEIEAAKSLGMTSVQVYRRVIIPNATVVAIPTLINGLIGLTKGTSLAFNAGIVEMFAQAQILGGSDYRYFERYISVALVYWSISILMEQVGRLIENKMAIKAPEQARNEKLGELR

SEQ ID NO: 249 - DNA, 1392 bp, Streptococcus pyogenes
atggagtttagaatgtctataaaagaacaaacagacaataacgaactagaaaatggaatggtaaggggcttagaaaatcgtcatgtgcagttaattgcgatcgcaggaacgattggaacaggtctctttttaggggcaggacgctctattgccctaacaggaccatctattatttttgtgtatatgattacaggtgccttcatgtttatgatgatgcgtgccatcggtgaaatgctctattatgatccagatcaacacacctttatcaattttatttccaaatacattggtccaggctggggttatttttcgggtctatcctattggatttcccttatttttattggaatggcagaaatcacagcagtaggtgcttatgtgcaattttggttcccaagctggccagcctggttgattcagttggttttcttagtcttacttagttcgatcaacttaattgctgtgcgcgtttttggggaaacagagttttggtttgccatgattaagattttagctattttagctttgattgcaacagctattttcatggtattgacaggttttgaaactcacacaggccatgctagcctttccaatatttttgaccatttttccatgttcccaaatgggaaactaaagttctttatggccttccaaatggttttctttgcttatcaagctatcgaatttgtgggaattaccacttctgagacggctaacccaagaaaagttctaccaaaggctattcaagaaattccaacccgtattgtgatcttttatgtgggagccttggtctctattatggcaattgtgccatggcatcagttaccagttgatgaatctccttttgtgatggtgttcaaattgattggtattaaatgggcagcagccttgattaactttgtggtcttgacatcagcagcgtcagcgcttaactcaaccctttattcaaccggtcgtcatctctatcagattgctaatgagactccaaacgctttgaccaatcgcttaaagattaatactttatctcgacaaggggtgccaagtcgtgccattattgcttcagcggttgtggttggtatctcagctttgattaatatcctaccaggagttgcagatgcgttctcactcattacggcctcctcatcaggtgtatatattgctatctacgccttaaccatgattgctcactggaagtaccgtcaatctaaggactttatggcagatggttatttgatgccaaaatataaagtgacaacgcctttgacccttgctttctttgcctttgtctttatctctcttttcttacaagaatccacctatatcggcgccattggagcaacgatttggattattatttttgggatttatagcaatgtcaaatttaaataa

SEQ ID NO: 250 - protein, 463 aa, Streptococcus pyogenes
MEFRMSIKEQTDNNELENGMVRGLENRHVQLIAIAGTIGTGLFLGAGRSIALTGPSIIFVYMITGAFMFMMMRAIGEMLYYDPDQHTFINFISKYIGPGWGYFSGLSYWISLIFIGMAEITAVGAYVQFWFPSWPAWLIQLVFLVLLSSINLIAVRVFGETEFWFAMIKILAILALIATAIFMVLTGFETHTGHASLSNIFDHFSMFPNGKLKFFMAFQMVFFAYQAIEFVGITTSETANPRKVLPKAIQEIPTRIVIFYVGALVSIMAIVPWHQLPVDESPFVMVFKLIGIKWAAALINFVVLTSAASALNSTLYSTGRHLYQIANETPNALTNRLKINTLSRQGVPSRAIIASAVVVGISALINILPGVADAFSLITASSSGVYIAIYALTMIAHWKYRQSKDFMADGYLMPKYKVTTPLTLAFFAFVFISLFLQESTYIGAIGATIWIIIFGIYSNVKFK

SEQ ID NO: 251 - DNA, 573 bp, Streptococcus pyogenes
ttgatctgttttcttagccttttctcctccacaagtagccactttctcactatttgtgttatgataaagtgtaaaacaaaggagattgaaatgacaaaagaagttatcgtcgaaagttttgagctagatcatactattgtaaaggccccttatgttcgtcttatttctgaagaatttggacccaagggcgatcgtattacaaattttgatgttcgcctagtgcagcctaaccaaaattctattgaaacagccggtttgcataccattgaacacttacttgccaagctcatccgccaacgcattgatgggatgattgattgctctccttttggctgtcgaacaggttttcaccttatcatgtggggaaaacacagttctactgatattgccaaggtgattaaatccagcctagaagaaattgcaactgggattacttgggaagatgttcctggaacaactcttgaatcctgtgggaactataaggatcatagcctctttgccgccaaagaatgggctcaattgattattgatcaagggatttcagacgatccttttagtcgccatgtcatctga

SEQ ID NO: 252 - protein, 190 aa, Streptococcus pyogenes
MICFLSLFSSTSSHFLTICVMIKCKTKEIEMTKEVIVESFELDHTIVKAPYVRLISEEFGPKGDRITNFDVRLVQPNQNSIETAGLHTIEHLLAKLIRQRIDGMIDCSPFGCRTGFHLIMWGKHSSTDIAKVIKSSLEEIATGITWEDVPGTTLESCGNYKDHSLFAAKEWAQLIIDQGISDDPFSRHVI

SEQ ID NO: 253 - DNA, 1608 bp, Streptococcus pyogenes
atggttaatattattttattaattgtttctgccctcattggtttaatattaggttatgcacttatttcgattagactcaagtctgcgaaggaagctgcagagttgactcttttaaacgctgaacaagaagctgttgatattcgtggcaaagcagaagtagatgctgaacacatcaaaaaaacagctaaacgtgaaagtaaagcaaatcgtaaagaattacttttagaagcaaaagaagaggcaagaaaatatcgtgaagagattgaacaagaatttaagtctgaaagacaagagcttaaacaactcgagacacgcttagcggagcgctccttaactcttgaccgtaaagatgaaaacctatcaagtaaagaaaaggtactagatagtaaagaacaaagtctgaccgataaatctaaacacattgatgagcggcaacttcaagtggaaaaacttgaagaggagaaaaaagcagaactggaaaaagttgctgcgatgacgattgcagaagcgcgtgaagtgattttaatggagacggaaaacaaactgacccatgaaattgcgacgcgcattcgagatgccgaacgtgacatcaaggaccgaacagttaaaacagccaaggacttgttagcgcaagccatgcaacgccttgctggtgagtatgtgactgaacaaactattaccagtgtccatctcccagacgacaacatgaagggccgaattattggacgtgaaggccgtaatattcgtactttagagagcttgactggcattgacgttattattgacgatactcctgaagttgttatcttatcaggatttgatcctattcgacgtgaaattgctcgtatgaccttggaatctctgattgctgatggtcgcatccatccagctcgtatcgaggaattggttgagaaaaatcgtcttgaaatggataatcgtattcgtgagtacggtgaagctgcagcctatgagattggtgcaccaaaccttcatcctgatttgattaaaatcatgggacgcctgcaattccgtacctcgtttggtcaaaatgtcctacgtcactctgttgaggttggtaagttagctggtattttagctggtgagttaggtgaaaatgttgctcttgcccgccgtgctggtttcttgcatgatatgggtaaagctattgaccgtgaggttgaaggcagtcacgttgagattggaatggaatttgcacgtaaatacaaagaacatccagttgttgtcaacactattgctagccaccacggagatgtggagccagattctgtgatcgctgtgctagtagctgcagcagacgctctcagttcggctcgtccaggcgctcgtaatgagtcaatggagaattacatcaagcgtcttcgtgatttagaagaaatcgcgacaagttttgatggggtacaaaatagttttgctctacaagctggacgtgagattcgtattatggttcaacctgaaaaaatttcagatgatcaggttgtcattttgtcgcataaagtaagagaaaaaattgaaaacaatctagattacccaggaaatattaaagtaactgttattcgtgagatgagagcggttgattatgccaagtag

SEQ ID NO: 254 - protein, 535 aa, Streptococcus pyogenes
MVNIILLIVSALIGLILGYALISIRLKSAKEAAELTLLNAEQEAVDIRGKAEVDAEHIKKTAKRESKANRKELLLEAKEEARKYREEIEQEFKSERQELKQLETRLAERSLTLDRKDENLSSKEKVLDSKEQSLTDKSKHIDERQLQVEKLEEEKKAELEKVAAMTIAEAREVILMETENKLTHEIATRIRDAERDIKDRTVKTAKDLLAQAMQRLAGEYVTEQTITSVHLPDDNMKGRIIGREGRNIRTLESLTGIDVIIDDTPEVVILSGFDPIRREIARMTLESLIADGRIHPARIEELVEKNRLEMDNRIREYGEAAAYEIGAPNLHPDLIKIMGRLQFRTSFGQNVLRHSVEVGKLAGILAGELGENVALARRAGFLHDMGKAIDREVEGSHVEIGMEFARKYKEHPVVVNTIASHHGDVEPDSVIAVLVAAADALSSARPGARNESMENYIKRLRDLEEIATSFDGVQNSFALQAGREIRIMVQPEKISDDQVVILSHKVREKIENNLDYPGNIKVTVIREMRAVDYAK

SEQ ID NO: 255 - DNA, 687 bp, Streptococcus pyogenes
atgcaattttccaggaattctgataaaatacaaagaaataaggggaaactaatgaaaaaatttcaattctttttacttatcgagtgtatactgctagctatgggtatcatgacaatcttggataatgatttatcaagttttatcctaattctagttcttatcttattagcattacgcttttataaccaagatagccgcaataattttttactaactgtcagtttattgtttctttttttaattttcatgcttaatccctacattatcatggctgttcttttggggatagtttacattttcattaaccatttttcacaagtcaaaaagaagaatcgctttgccttgattcgtttcaaggaagaaaagattgaagtgaacaataccaagcatcaatggattggtactgctaattatgaaagtgattattattgttttgatgacattaacatcattcgaatctcaggaaatgacacggttgacttaaccaatgttattgtgacaggaatggataatatcattgtgatacgtaaaatttttggaaatacgactatattggtacctattgatgtcactgttactttagatgttagttccatatacggaagcgttgatttttttagatgtcagcaatatgatttgcgcaacgaatctattaagttgaaagaaacggataaccaatccctttaa

SEQ ID NO: 256 - protein, 228 aa, Streptococcus pyogenes
MQFSRNSDKIQRNKGKLMKKFQFFLLIECILLAMGIMTILDNDLSSFILILVLILLALRFYNQDSRNNFLLTVSLLFLFLIFMLNPYIIMAVLLGIVYIFINHFSQVKKKNRFALIRFKEEKIEVNNTKHQWIGTANYESDYYCFDDINIIRISGNDTVDLTNVIVTGMDNIIVIRKIFGNTTILVPIDVTVTLDVSSIYGSVDFFRCQQYDLRNESIKLKETDNQSL

SEQ ID NO: 257 - DNA, 1005 bp, Streptococcus pyogenes
atgaaaaaacgttactatgctcttgtttggctctactcaaccattaccattttatctattgtttttgtggtcatggataatttaggaatcacttttaactaccttcgcaatcatttatggcaggtcgaacgtctagggttttcgattttattgttgattgtttctgtgactttattattgttgttattgtggattattatggatgataacagtaagcgtaacatcaaccaaaatctaaaatatattctcaataatcgacgactctatctagatgagacatcagaaatcaatactaatttaagtcgactttctaaaaaaatgtctcacctgactgctaacatgcaaaagaaagaaagtgcttatattcttgatagccaagaagttgtaaaacaagagcgcaaacgaattgcaagagatttacatgacacagtcagtcaagagctattcgcttcgtcattgattttatcaggaatttcgatgagtttggaacaactggacaaaacacaattacaaacacagttaacaacggttgaagcaatgttgcaaaatgctcaaaatgatctacgcattctccttttgcatcttagacctaccgagctagctaatcggactttatctgagggccttcatatgattcttaaggaattaacagataaaagtgatattgaagtcatttataaggaaaccattgctcagcttcctaaaacaatggaagataatctttttagaattgcccaagaattcattagcaacacgttaaaacatgctaaagctagtcgaattgaagtttatctcaatcaaacctcaacagaattacaattgaagatgattgatgatggtgtaggatttgatatggatcaggtaagggatttgagttatggtctgaagaatattgaagaccgtgtcaatgatttagcaggaaacctacatttaattagtcaaaaaggcaaaggagtttccatggatattagactgccgatagtgaagggagatgacgatgagtaa

SEQ ID NO: 258 - protein, 334 aa, Streptococcus pyogenes
MKKRYYALVWLYSTITILSIVFVVMDNLGITFNYLRNHLWQVERLGFSILLLIVSVTLLLLLLWIIMDDNSKRNINQNLKYILNNRRLYLDETSEINTNLSRLSKKMSHLTANMQKKESAYILDSQEVVKQERKRIARDLHDTVSQELFASSLILSGISMSLEQLDKTQLQTQLTTVEAMLQNAQNDLRILLLHLRPTELANRTLSEGLHMILKELTDKSDIEVIYKETIAQLPKTMEDNLFRIAQEFISNTLKHAKASRIEVYLNQTSTELQLKMIDDGVGFDMDQVRDLSYGLKNIEDRVNDLAGNLHLISQKGKGVSMDIRLPIVKGDDDE

SEQ ID NO: 259 - DNA, 285 bp, Streptococcus pyogenes
ttgtttataccatttagaaataatatcctctgccttccctgcctcatagtaagcgttgtcaaagcccatggctttggcatttttttgtgcatcttcaatcgcttctgggataatatccatcccccgcacagacttgaccttccctgcaaaagcaaagccaatcgagccaaccccacaataggcatcaataatatgatctttgctccctacatccaaggccttcaccacctcaccatacaaaacttctgtctgctgtggattaagttggtaaaaagctctcggtga

SEQ ID NO: 260 - protein, 94 aa, Streptococcus pyogenes
MFIPFRNNILCLPCLIVSVVKAHGFGIFLCIFNRFWDNIHPPHRLDLPCKSKANRANPTIGINNMIFAPYIQGLHHLTIQNFCLLWIKLVKSSR

SEQ ID NO: 261 - DNA, 1356 bp, Streptococcus pyogenes
atgttagaagattttcttcaatttttaggatttatatttttagatattattgaaattatgttaacgttaaagctttttagctttgtaagtgcaattccgcttcgcctgaaaaatattttttatttatcacttagtatggttttgtttcaagtagttttttgggctttctttccagaccatttcattcttgatgttgtgatgttggctcagtttcttttctttgcgcttatagccctatactatggtaaatcaataaaagctaagtttttaatgttttatgccttttttccactagtgtctattagtttggttaagcgatttattgtattttttgttatgccattgtttggtatgccttattcagttgttaaacataatacactactgatttacagcattacttgttttagtatttttttgatttatcgctgcattcaagtttttcatttcgatttttcaacctggcgccaatattttcaatcacatagagctagtaaactattagtgtttactaactcttcgatggctctatattacttgtgtgtccaagggatagatgtgatgtcgccttctttatcaggacttgctacaacgactgctcgttcaatcatagtgctcttttatttcattttgtttcttactttattaattcatttagagcgttatgtaaaacaaaactctattgaggcaattgtgcaacaaaaagaatatcgtgagctgattaattatagtcagcaccttggattgctgtatcaagatattcaagagcttaggcggctattaactaccgtgtctagtcgtcttaagattggaatcgaacaaaatgatatctctattgtgagacttacttatgaaggtatcttgaatgctgaaaagaataatgctaaagatgacagacttgatttaacttgtttagataaattacaagttgaagcaatcagacatattgttttagctaaattaattgaggcaaaaaataagaagcttaaggttgaggtatcgatccctaattgtattgcaacgttttttctagaagtagtagatttcactaagctattgtcatttttgttagataatgctatagaaatgagtttggagacaaagcaaccttgcttatcaatagcatttctggatcaaaaccataaacttgtcatagtcattcaaagcagtactaaacaaggacaagatgatagtcaaagcgtgtttgctataccggctttgaaaaaaagagatgactggcaatttgacttaaggaatgtcacgaccattttaaatcgttatgactatctcacaattagctcgcagattcatgatggcattttaacccagttaatagaaatagctaagcctgactga

SEQ ID NO: 262 - protein, 451 aa, Streptococcus pyogenes
MLEDFLQFLGFIFLDIIEIMLTLKLFSFVSAIPLRLKNIFYLSLSMVLFQVVFWAFFPDHFILDVVMLAQFLFFALIALYYGKSIKAKFLMFYAFFPLVSISLVKRFIVFFVMPLFGMPYSVVKHNTLLIYSITCFSIFLIYRCIQVFHFDFSTWRQYFQSHRASKLLVFTNSSMALYYLCVQGIDVMSPSLSGLATTTARSIIVLFYFILFLTLLIHLERYVKQNSIEAIVQQKEYRELINYSQHLGLLYQDIQELRRLLTTVSSRLKIGIEQNDISIVRLTYEGILNAEKNNAKDDRLDLTCLDKLQVEAIRHIVLAKLIEAKNKKLKVEVSIPNCIATFFLEVVDFTKLLSFLLDNAIEMSLETKQPCLSIAFLDQNHKLVIVIQSSTKQGQDDSQSVFAIPALKKRDDWQFDLRNVTTILNRYDYLTISSQIHDGILTQLIEIAKPD

SEQ ID NO: 263 - DNA, 999 bp, Streptococcus pyogenes
ttgatatactgtaactataacgtgattaacacaaagggaggttgggaaatgataagacaaaccaacaaaaagacatccttttggaaaaatgtgattaaataccgggccttattattaatggtattaccaggtttcatctggttcatctttttcttttatattccagttttagccaatgtggttgcttttaaagattttcattattcagcagggggctttatggaaagtttgaaggagagcccttgggttggtttggctaacttcaaatacctctttgcttccaaagatgcttggttgattaccagaaataccattgcttacaatgtgattttcttactctttaatgttttctttgcgattgcttttgccattatcatgagtgagttacgaaataagagaacggttaaggtctatcacaccatgtccttattgccttatttcttatcatgggtggttattgaatactttgtttctgcctttttaaatacggataaaggtttcattaatcagctcttgaccggaagtggagcagatccaatcaagtggtattccaatcccacttggtggcccttgattttacttttcatgagtgtctggaaggggctaggctacaatagcattatctactatgcttcagtcaaagggatttctgatacttattatgaagctgctatggtggatggtgcaagcaaatggcaacaaattaggaacatcaccattccacaattattgccaatgatgtctatcttattgatcattaatattggtaatatttttaaatctgatttcggacttttctacgttattcctaagaattcaggcccactttatgacgtgaccagtgtgtcagatacctatgtctacaatgccttgactgctacaggagatattgggatggcatcggcagctagcctttatcagtcagtagttgggaccagcatcttgttagtcaccaatgcgattgttcgtcgcatggaccctgatgcagccttgttttag

SEQ ID NO: 264 - protein, 332 aa, Streptococcus pyogenes
MIYCNYNVINTKGGWEMIRQTNKKTSFWKNVIKYRALLLMVLPGFIWFIFFFYIPVLANVVAFKDFHYSAGGFMESLKESPWVGLANFKYLFASKDAWLITRNTIAYNVIFLLFNVFFAIAFAIIMSELRNKRTVKVYHTMSLLPYFLSWVVIEYFVSAFLNTDKGFINQLLTGSGADPIKWYSNPTWWPLILLFMSVWKGLGYNSIIYYASVKGISDTYYEAAMVDGASKWQQIRNITIPQLLPMMSILLIINIGNIFKSDFGLFYVIPKNSGPLYDVTSVSDTYVYNALTATGDIGMASAASLYQSVVGTSILLVTNAIVRRMDPDAALF

SEQ ID NO: 265 - DNA, 927 bp, Streptococcus pyogenes
atggagaaaaagaaaaaagtcgaaaaggttaatgttagaacctttgatcgaaaaaccaatgctatctttaatattctgattggtctgtttgccatctcttgtatcattccttttatcttcgtgattattatttccttcactgatgaaagttacttgattaatcatgggtatagtttttttccagatgtctggtcaactaaggcttaccagtatatttttcaaggagccatgtcccatagaatcatgaggtcatttgggatatccgtgtttattacagtggtgggaacctttattaacacgaccatgacatcaacctatgcttatgcgatttcaagaccttatttcccatacagacgtttttttactgtttatgcacttatcaccatgctctttgcaccagggatggttgctaattacttggtggtcagcaatctccttcatttgaaggatacggtttgggccttgattttaccaatggctctgggcccatttggcatcttggtcatgagaacgttctttaaaaagacagttccagatagcattattgagtcggctcgtatggatggggctagtgaatggatgatttttatgaaaattgtcttaccattagctgttccagggattgccaccatcagtttattttctgccttaacttattggaatgattggtttaacgccttgctttatgtgcaaagtgagaatctttacccaatgcagtacttactgatgaaaattcagagcaacctacaggccttggcacaaaatgctggcatgagtgcacaaatggcagatagcttagcatcgctgccaaaagaatcagttcgtatggctatcgtggttattgcaaccttgccgattgccttgacttacccattcttccaaaagtactttgtcggtggtttgaccattggtggggtgaaggaatag

SEQ ID NO: 266 - protein, 308 aa, Streptococcus pyogenes
MEKKKKVEKVNVRTFDRKTNAIFNILIGLFAISCIIPFIFVIIISFTDESYLINHGYSFFPDVWSTKAYQYIFQGAMSHRIMRSFGISVFITVVGTFINTTMTSTYAYAISRPYFPYRRFFTVYALITMLFAPGMVANYLVVSNLLHLKDTVWALILPMALGPFGILVMRTFFKKTVPDSIIESARMDGASEWMIFMKIVLPLAVPGIATISLFSALTYWNDWFNALLYVQSENLYPMQYLLMKIQSNLQALAQNAGMSAQMADSLASLPKESVRMAIVVIATLPIALTYPFFQKYFVGGLTIGGVKE

SEQ ID NO: 267 - DNA, 1728 bp, Streptococcus pyogenes
ttgatgagtgttaaaacattgggaaggtatgtgactaaccactttaagcagggttttttgattaatcgactgatgaaattatatagcctgctaattgtaagttttttcactttagcagctattggcttgagcagttattctattagtagtacttataaaagggtggatgctgaggcgcagatgcgattggaggagactctaggtagattgcagtcacaaaacgatattaccctacgggttttagaccagttggttggccgttcagaagattaccataatctctatcaatacatgacgttaaccccaaaccaatatttttcaaacgtttttgaagactgggaaaaaggaaaagacacggtcctattttctgaagaggtgaggcgtctttttgacttgtaccctgatgtgacttctatgaccctactgctagaggacagtagtgcttatctgtacgccgataaggtcattaagacgggtcgtttgctttatagcaagcctgaaaaagtaaccggaaatgttttagttcgctctattcgaaatccagaatcaggagatgtgacaggtcgtctttacctgacctttgacaaaccaccgactttggtagagacacagcaggatcactatttagctacttttgcttttgattactatggccgcaaactcttccatcaaggaggtcggagatttcctcatttagaggctgaggttaaaaaggctatcaaggcagatcgggcagctgatcttagtaatcttagcaaggcttatcggatgcagtacaatcgctcgggagacctcttggcttatgtggctgtcagaaaatcctatttattagcggaagctgtcaggacagtttttgtgtatggccttgtttctctacttttagcttggctgttattgcagttgctctttagggttttccgaaattatatccagcaggtttctgaaattacggatactgttgaaatggttgcagcaggcgatttgtctttaaccatcgacaacagccacatggaattggaactgtatcatatctcagaagccattaatcagatgttggccagcattaaagcttatattgacgaagtttatgtgttagaggtagagcaacgagatgcccaaatgagagctctgcagtctcaaatcaaccctcattttttatacaacacgttagagtatattcggatgtacgcccttagttgtcaacaagaagaattagcagatgtcatttatgcctttgcgagtctgcttcgcaacaatattagccaagataagatgaccaccttaaaagaagaactggctttttgtgaaaagtacatttacctttatcaaatgcggtatccagatagcttcgcttatcatgtaaaaattgatgagagtgttgctgacttagccattcctaaatttgtcattcaacctctcgttgaaaattattttgtgcatgggattgattatagtcgccatgacaatgcactaagcatcaaggctttagatgagacggatcatctcttgattcaggtgcttgataatggacgtggtattagtcaagagcgcttagcagatatggaaaaaaggcttcaagagcaccaaacaacaggcaatagctctattggtttgcaaaatgtttacctccgtctctttcatcattttcgagacagggtttcttggtccatggctaaggagccaaatggtggctttatcattcaaattaggattagaaaggatgcttga

SEQ ID NO: 268 - protein, 575 aa, Streptococcus pyogenes
MMSVKTLGRYVTNHFKQGFLINRLMKLYSLLIVSFFTLAAIGLSSYSISSTYKRVDAEAQMRLEETLGRLQSQNDITLRVLDQLVGRSEDYHNLYQYMTLTPNQYFSNVFEDWEKGKDTVLFSEEVRRLFDLYPDVTSMTLLLEDSSAYLYADKVIKTGRLLYSKPEKVTGNVLVRSIRNPESGDVTGRLYLTFDKPPTLVETQQDHYLATFAFDYYGRKLFHQGGRRFPHLEAEVKKAIKADRAADLSNLSKAYRMQYNRSGDLLAYVAVRKSYLLAEAVRTVFVYGLVSLLLAWLLLQLLFRVFRNYIQQVSEITDTVEMVAAGDLSLTIDNSHMELELYHISEAINQMLASIKAYIDEVYVLEVEQRDAQMRALQSQINPHFLYNTLEYIRMYALSCQQEELADVIYAFASLLRNNISQDKMTTLKEELAFCEKYIYLYQMRYPDSFAYHVKIDESVADLAIPKFVIQPLVENYFVHGIDYSRHDNALSIKALDETDHLLIQVLDNGRGISQERLADMEKRLQEHQTTGNSSIGLQNVYLRLFHHFRDRVSWSMAKEPNGGFIIQIRIRKDA

SEQ ID NO: 269 - DNA, 1107 bp, Streptococcus pyogenes
atggaacataaatggaaattatggctatttatcgttggagtggtcttgttaataggcggagcttctgttctcattcagaaaggtcaagccaaggcttttagtcaaggcaagcctcaactaccagctaaaaaagtcaaatccactaaagtagatcccaatgcccctgttgatcaaaaagtgatttacctggctggaggctgtttctggggcgttgaagaatatttttcacaagtggatggcgttctagatgcggtgtcaggctatgccaatggtagaggcgataccaccaactaccagttaattcatcagactggtcatgcagaaaccgttgaagtggcctatgatgcgaaccgtattagcttgaaagaattattactgcattttttccgaattattgacccaaccagtcttaataagcaaggaaatgatcgcggtagtcaataccgaactgggatttactatactgacaaagcagatttagctattattgatgaggtcttcaaagaaaaagctaaggattacaagaaaaaaatagtggttgaaaaagcaccattgaaacactttattaaggcagaagactaccaccaagattacctcaagaaaaatccaaatggctactgccatattgacatcaaccaagcgacttatcctgtgattgatgaaagcaagtacccaaaaccaagtgccactgagatcaaggaaaaactatctgcagacgaataccgagtgacgcaaaaaaacgaaactgaaaaagctttttctaatcgctactgggattcttttgatgcaggaatttacgtagacgttgtgacaggagaaccgcttttctcttcaaaagacaaatttgaatcaggttgtggttggccaagctttagccgccccatcagcccagacgttgtccgctacaaggaagataagagtttcaatatgacgagaacagaagtgcgcagccgttcagggaattctcatctggggcatgtctttactgacggacctaaagaccaaggcggccttcgttactgcatcaatagcttgtctattacctttattccaaaagctgatatggaagctaagggctatgggtatttattatcatctgtagaatag

SEQ ID NO: 270 - protein, 368 aa, Streptococcus pyogenes
MEHKWKLWLFIVGVVLLIGGASVLIQKGQAKAFSQGKPQLPAKKVKSTKVDPNAPVDQKVIYLAGGCFWGVEEYFSQVDGVLDAVSGYANGRGDTTNYQLIHQTGHAETVEVAYDANRISLKELLLHFFRIIDPTSLNKQGNDRGSQYRTGIYYTDKADLAIIDEVFKEKAKDYKKKIVVEKAPLKHFIKAEDYHQDYLKKNPNGYCHIDINQATYPVIDESKYPKPSATEIKEKLSADEYRVTQKNETEKAFSNRYWDSFDAGIYVDVVTGEPLFSSKDKFESGCGWPSFSRPISPDVVRYKEDKSFNMTRTEVRSRSGNSHLGHVFTDGPKDQGGLRYCINSLSITFIPKADMEAKGYGYLLSSVE

SEQ ID NO: 271 - DNA, 1035 bp, Streptococcus pyogenes
atgaagcgttatcccctactggtccagttgatttcgtatgtttttgtgatcgtaattgccctcattaccacgcttggtttgctttattaccagacgagttctcgtaatatcaggcaactaattgaacgtgatacccggcagagcattcggcaaagttcccaatttattgacgcttacatcaagcctcttaaagaaacaacttcggtgctggcgaaaaatacggaaattcaagcctttgctagtcaaattcatcaagaaaatgacaaacaggttcttcagctcatgaagatggttcttgcgaccaattccgatttacaagcagctgttctggtgactaaggatggtcgaacggtgtctaccaattctcagttgaccatgaaaacctccagtgacatgatggcagaaccctggtataaagcagccatagaccgtcaagccatgccaatcttaaccccagctcggcaattatccctttcttctaaaaaagaatgggtagtttctgtgacccaagaggtagtagatagggctgggcataatttaggtgtgctaagacttgatattgcatacccgaccattaaagcgtctttagatcagcttcagctaggccgccaaggctttgcctttattgtgaatgataagcatgaatttgtttaccatcccaaaaagagtgtttacagttcttctaaggagatggctgcgatgaaaccttatttagcgattcagaatggttacactaaggacaagacatcttttgtttaccaaaaactcattcctaacagtcaatggactttagtgggagtggcgtcactggatcagttgcaccgggtgcagcgccaaattttttggtccttttcttggaacagggcttctaccctgtctgatttgtggctttgcaactgtcttagtcttacgcagatggattcgtcccattcaacaattgcagcaagttattcttgctattcaaaaaggagatcgtcagttacgtgcccaagaaacgggttctccagaattgacagaccttgcccaacagtttaa

SEQ ID NO: 272 - protein, 344 aa, Streptococcus pyogenes
MKRYPLLVQLISYVFVIVIALITTLGLLYYQTSSRNIRQLIERDTRQSIRQSSQFIDAYIKPLKETTSVLAKNTEIQAFASQIHQENDKQVLQLMKMVLATNSDLQAAVLVTKDGRTVSTNSQLTMKTSSDMMAEPWYKAAIDRQAMPILTPARQLSLSSKKEWVVSVTQEVVDRAGHNLGVLRLDIAYPTIKASLDQLQLGRQGFAFIVNDKHEFVYHPKKSVYSSSKEMAAMKPYLAIQNGYTKDKTSFVYQKLIPNSQWTLVGVASLDQLHRVQRQIFWSFSWNRASTLSDLWLCNCLSLTQMDSSHSTIAASYSCYSKRRSSVTCPRNGFSRIDRPCPTV

SEQ ID NO: 273 - DNA, 798 bp, Streptococcus pyogenes
ttgcagcaagttattcttgctattcaaaaaggagatcgtcagttacgtgcccaagaaacgggttctccagaattgacagaccttgcccaacagtttaatgcgctcttagatcaaattgatagcttgatggttgccgttgcggataaggaaaaggcgattgggcagtataggttacaagccttggctagtcagattaacccgcattttctctataacaccttggacactattatttggatggcagaatttaatgacagcaagcgcgtggtagaagtgaccaagtctctagctaagtattttcgtttggcccttaatcaggggaacgaatacattcgtttggcagatgaactggatcacgttagccaatacctctttattcaaaaacagcgctatggagacaagctaagttatgaagtgcaaggcttagatgtctacgcagactttgttattcctaagcttatcttacagcccttagtagaaaatgctatctaccatggcatcaaagaagtcgatcgcaagggcatgatcaaggttacggtatctgatacagctcagcatctgatgttgactgtttgggataatggtaaaggcattgaagactcttcactgaccaatagtcagagcttgttggctaggggaggtgtgggccttaaaaatgttgaccagcggttaaaacttcactatggtgaaggctaccacatgaccattcatagccagtcagaccagttcactgaaatacaattaagccttcctaaaatgcatgaattaatggcagacgacacacaggaaaacgagtaa

SEQ ID NO: 274 - protein, 265 aa, Streptococcus pyogenes
MQQVILAIQKGDRQLRAQETGSPELTDLAQQFNALLDQIDSLMVAVADKEKAIGQYRLQALASQINPHFLYNTLDTIIWMAEFNDSKRVVEVTKSLAKYFRLALNQGNEYIRLADELDHVSQYLFIQKQRYGDKLSYEVQGLDVYADFVIPKLILQPLVENAIYHGIKEVDRKGMIKVTVSDTAQHLMLTVWDNGKGIEDSSLTNSQSLLARGGVGLKNVDQRLKLHYGEGYHMTIHSQSDQFTEIQLSLPKMHELMADDTQENE

SEQ ID NO: 275 - DNA, 1494 bp, Streptococcus pyogenes
atgacagaagaaaaaaaacggggttttagaattccttcttcttacaccgttctttttatcattatagccatcatggcagtgttaacttggtttattccagctggcgcctacgaaaccgctaagggcggtggtgttatttcaggaacctacaaaacagtagcatccaatcctcaaggattttttgacatcttgatggctcccgttcgaggcatgttaggtgttgaaggcactgatggtgctattcaagtgtctttctttatcttaatggttgggggctttttaggagttgtcaacaaaacaggtgctcttgacacagggattgcgtcagtggttcgtaaaaacaaaggtagagaaaaaatgctgattgctattttaatccctttgtttgctctaggtggaacgacctatggtatgggggaagaaaccatggccttttacccacttttaattcctgttatgattgcggttggttttgacagtattgttgctgtagccattattttgattggttctcaaattgggtgtctagcctccactattaacccatttgcaactggtgtagcagctgatgctgctggtgtcagcattgcagatggaatgatttggcgtgttatccaatgggttattcttgtcggcatgtctatttggtttgtttacaattacgctagtaagattgaagaagacccaagtaaatcattggttgcagacaaggaagaagagcataaggaactcttccagttgcaaaattctggagaagacttaaacaagcgccaacgaaacgttttgaccatttttactttgacctttgtcattatgattcttagtttgattccgtgggaagattttggcatcaaattctttactaatatcaatacttggttaaccacaatgcctatcttagggggagttattgggaaaaccatgggagcatttggtacttggtatttcccagaaatcaccatgctctttatcatgatgggtgtcttagttgctattgtttatcgtatgagtgaagaagacttttttagctcttttttgactggtgcaggtgaatttttaggtgttgccatgatctgtgctattgcacgcggtattcaagttatcatgaatggtggtatgattacagccactatcttacacttaggtgaaacaagtctttctggtttatcttctcaagtttttgtgatattagcttatattttctacctcccaatgtccttcttgattccatcaacatcaggacttgctggggctacaatgggaattatggcaccgcttggacaattctcaaatgtccctgctcaccttgttattacagccttccagtcagcttctggaatcttaaacatgatttctccaacttcagcaatcgttatgggagcacttgcgcttggtcgcgttgaccttggtacttggtggaaattcattggtaaatttattgtaatggtgatgcttgtaagcgtgctattacttgtagttgcaacattcttttaa

SEQ ID NO: 276 - protein, 497 aa, Streptococcus pyogenes
MTEEKKRGFRIPSSYTVLFIIIAIMAVLTWFIPAGAYETAKGGGVISGTYKTVASNPQGFFDILMAPVRGMLGVEGTDGAIQVSFFILMVGGFLGVVNKTGALDTGIASVVRKNKGREKMLIAILIPLFALGGTTYGMGEETMAFYPLLIPVMIAVGFDSIVAVAIILIGSQIGCLASTINPFATGVAADAAGVSIADGMIWRVIQWVILVGMSIWFVYNYASKIEEDPSKSLVADKEEEHKELFQLQNSGEDLNKRQRNVLTIFTLTFVIMILSLIPWEDFGIKFFTNINTWLTTMPILGGVIGKTMGAFGTWYFPEITMLFIMMGVLVAIVYRMSEEDFFSSFLTGAGEFLGVAMICAIARGIQVIMNGGMITATILHLGETSLSGLSSQVFVILAYIFYLPMSFLIPSTSGLAGATMGIMAPLGQFSNVPAHLVITAFQSASGILNMISPTSAIVMGALALGRVDLGTWWKFIGKFIVMVMLVSVLLLVVATFF

SEQ ID NO: 277 - DNA, 1365 bp, Streptococcus pyogenes
atggctagaaatggcttttttactggtttggacattggaacaagctcgataaaagttttagtagcagaatttatttctggtgagatgaacgtcattggtgttagtaatgttccaagtaccggcgtaaaagatggcataataatcgatatagaggcagctgcgactgccatcaaaactgcggtagaacaagcagaagaaaaagcagggatgacaattgaaaaggttaatgttgggctaccggcaaaccttcttcaaattgaaccaacacaaggaatgattcctgtcccaagtgagtctaaagagataaaagatgaggatgttgatagcgttgttaaatcggctttaacaaaaagtatcacaccagaacgagaggttatctctttagttccagaagagttcattgtggatggctttcagggcattcgagatccacgtggtatgatggggattagattagagatgcgcgggcttatttatactggaccaagcaccattttacataatctgcgtaaaacggtagaaagagcaggcattaaagttgaaaacatcattatttctccgttagctatggctaaaaccattttaaacgaaggtgagcgcgagtttggagctactgtaattgatatgggaggtggacagacaactgtcgcttctatgcgagcacaagaattgcagtataccaatatatatgccgaaggcggcgaatacattactaaagatatatcaaaagtattaaaaacgtctttggctattgcagaagcacttaagtttaattttggtcaagcggagatatcagaagctagtataactgaaacagtaaaagttgatgtggtaggtagtgaagagcctgttgaggtaactgaacgttatttatctgaaattatttcagcgcgtattcgtcatattttagatcgtgtgaagcaagatttggaaagaggtcgtttactagacttaccaggaggcattgttttgattggtggcggtgcaatcatgcctggagtggtagaaattgcacaagaaatctttggagtaactgtaaagctccatgttccaaaccaagtcggtattagaaatccaatgttttcaaacgttatcagtttggtagaatatgttggtatgatgtctgaagtagacgttttagcacaaactgcagtttcaggagaagaacttttgcgacgcaagcctatcgatttcagtggccaagaatcttatttaccagattatgatgattcaagaagaccagaatcgaccattggctatgaacaacaagcgtcacaaacagcatatgattcacaagttccgagtgatcctaaacaaaaaatttcagaacgtgttcgtggcatatttgggagtatgtttgattaa

SEQ ID NO: 278 - protein, 454 aa, Streptococcus pyogenes
MARNGFFTGLDIGTSSIKVLVAEFISGEMNVIGVSNVPSTGVKDGIIIDIEAAATAIKTAVEQAEEKAGMTIEKVNVGLPANLLQIEPTQGMIPVPSESKEIKDEDVDSVVKSALTKSITPEREVISLVPEEFIVDGFQGIRDPRGMMGIRLEMRGLIYTGPSTILHNLRKTVERAGIKVENIIISPLAMAKTILNEGEREFGATVIDMGGGQTTVASMRAQELQYTNIYAEGGEYITKDISKVLKTSLAIAEALKFNFGQAEISEASITETVKVDVVGSEEPVEVTERYLSEIISARIRHILDRVKQDLERGRLLDLPGGIVLIGGGAIMPGVVEIAQEIFGVTVKLHVPNQVGIRNPMFSNVISLVEYVGMMSEVDVLAQTAVSGEELLRRKPIDFSGQESYLPDYDDSRRPESTIGYEQQASQTAYDSQVPSDPKQKISERVRGIFGSMFD

SEQ ID NO: 279 - DNA, 1320 bp, Streptococcus pyogenes
atggcattttcatttgatactgcatcaattcaaggtgcaattataaaagtaattggagtcggcggaggtggcggaaatgccattaatcgtatgattgatgaaggtgttgctggtgtcgagttcatcgcagcaaacacagacattcaggcattaagctcatcaaaagctgaaacggttattcaactaggccctaaattaactcgtggacttggtgctggaggacaacctgaagtaggacgtaaagctgctgaagaaagcgaagaaattttaacagaagctcttacaggagcggacatggtatttattactgccggtatgggtggtggctctgggacaggggctgcaccggttattgctcgtatcgctaaaagtttgggagccttgacagtagctgttgttactcgcccgtttggttttgaaggtaacaaacgtggtaattttgctattgaaggtatcgaagaactacgtgaacaagttgatactttgttaattatttcaaataataaccttcttgagattgttgataaaaagacacctttattagaagcacttagtgaagctgataatgttttacgccagggagttcaagggataaccgacttaattactagtcctggccttatcaatctcgattttgccgacgtgaaaacagttatggcaaataaagggaatgccttgatggggattgggattggctctggagaagagcgcattgttgaggcggcgcgtaaggcaatctattcacccctattagaaacgactattgatggtgcacaagacgttattgtgaacgttacaggaggtctcgacatgacacttacagaagctgaagaagcctctgaaattgttgggcaagctgctggtcaaggcgttaacatttggttaggaacatctattgatgatactatgaaagatgacatccgtgtgactgttgtagcaactggagtgcgccaagaaaaagccgaacaagtttcaggttttcgtcagcctaggacttttacccaaaccaacgcgcagcaagtagcgggtgcacaatatgcatcagatcaagcaaaacagtcggttcaaccagggtttgatcgtcgctcaaattttgattttgacatgggggagtctcgcgagataccaagtgcacaaaaggtaatttctaatcataatcaaaatcaaggttctgcttttggaaattgggatttgagacgtgataatatttctcgtccaacagaaggtgaattggataaccatcttaatatgtcaacgttctcagctaacgatgacagtgatgatgaattagaaacgcctccattctttaaaaaccgttaa

SEQ ID NO: 280 - protein, 439 aa, Streptococcus pyogenes
MAFSFDTASIQGAIIKVIGVGGGGGNAINRMIDEGVAGVEFIAANTDIQALSSSKAETVIQLGPKLTRGLGAGGQPEVGRKAAEESEEILTEALTGADMVFITAGMGGGSGTGAAPVIARIAKSLGALTVAVVTRPFGFEGNKRGNFAIEGIEELREQVDTLLIISNNNLLEIVDKKTPLLEALSEADNVLRQGVQGITDLITSPGLINLDFADVKTVMANKGNALMGIGIGSGEERIVEAARKAIYSPLLETTIDGAQDVIVNVTGGLDMTLTEAEEASEIVGQAAGQGVNIWLGTSIDDTMKDDIRVTVVATGVRQEKAEQVSGFRQPRTFTQTNAQQVAGAQYASDQAKQSVQPGFDRRSNFDFDMGESREIPSAQKVISNHNQNQGSAFGNWDLRRDNISRPTEGELDNHLNMSTFSANDDSDDELETPPFFKNR

SEQ ID NO: 281 - DNA, 687 bp, Streptococcus pyogenes
atggatttgtcatttttgcccaaatactgggcctactttaactacggtgtacttgtcaccattatgatttcagtcagcgttgtcttttttggaacccttattggtgtcttggtaaccctgattaagcgtagtcatgtgaagccgttgacctgggtcgttaatctttacgtttggatctttcggggaacacctatggtggttcaaatcatgattgcctttgcttggatgcattttaacaatatgcctactattggttttggggttttagacttggacttttcaagactacttcctggaattattatcatttcattgaatagcggtgcttatatttcagaaattgttagagcaggtattgaggctgtaccaaaagggcaattagaagcagcttattcactaggtattcgtcctcaaaatgccatgcgttatgtgattttgcctcaggcctttaaaaatattttgccagccttaggaaatgaatttattaccattattaaggatagtgctcttttacaaaccattggagtgatggaactttggaatggtgcccaatcggtggtaacggctacttattctccaatttcccctttactggtggctgctttttactacttaatggtcacaacagtgatggcacagttattggcagtcttagaacgtcacatggcgcaaggaggtaatcattga

SEQ ID NO: 282 - protein, 228 aa, Streptococcus pyogenes
MDLSFLPKYWAYFNYGVLVTIMISVSVVFFGTLIGVLVTLIKRSHVKPLTWVVNLYVWIFRGTPMVVQIMIAFAWMHFNNMPTIGFGVLDLDFSRLLPGIIIISLNSGAYISEIVRAGIEAVPKGQLEAAYSLGIRPQNAMRYVILPQAFKNILPALGNEFITIIKDSALLQTIGVMELWNGAQSVVTATYSPISPLLVAAFYYLMVTTVMAQLLAVLERHMAQGGNH

SEQ ID NO: 283 - DNA, 432 bp, Streptococcus pyogenes
gtgccgccagttgatccaacaatgttagctgtaactgtggcagtttcagacgtgtcttccagtttagctttaatgtcagctaagctatccttgctaaaaccggctttggccaaagcatcatcaatctgcttttcatcaacttcaaggtctttaagagacgttctaaattcttcaagttttttatcaaaatcttgctctttagtgtcagcatcagataaaaattttttgagtcgctcatcgactgccttggctagctcctcagcttccagcactttagcgttaacctcagcaactttgacctctgcattagcttcagcttttttgatgccatcttcaatctcttcacggagtttagcttcttttgtgtcaaaaatacgattagcattatcaatctgcttttgtaattttgcttcaaatgctgcgtcatgttga

SEQ ID NO: 284 - protein, 143 aa, Streptococcus pyogenes
MPPVDPTMLAVTVAVSDVSSSLALMSAKLSLLKPALAKASSICFSSTSRSLRDVLNSSSFLSKSCSLVSASDKNFLSRSSTALASSSASSTLALTSATLTSALASAFLMPSSISSRSLASFVSKIRLALSICFCNFASNAASC

SEQ ID NO: 285 - DNA, 807 bp, Streptococcus pyogenes
atggatatgtctaaatcaaatcgtcgtacttggcaaggtttagttgttattttaatagctattctcaccacttttaccacaagtactgttacggcagccagaaaaattagaaatttccctgataccacggaaattttgttaggaacgaaggcgactgagacaccaggaatcttaccattcactggtagctaccaattagttttgggcgatcttgacaatctgcaaaggccaaccttcgcacacatccagctaaaagatcaagatgagcctaatattaaacgaaaaggacttaaattcaatcctcctggctggcataattacaaattgactgacgctaatggaaaaacaacttggttaatggaccgtggccatttagttggttaccaatttagcggcttaaatgacgagcctaaaaacctagttacaatgacaaaatatcttaatactggctttagtgacaaaaatcctttaggaatgctctattatgaaaatagattagatagctggttagctctacaccctaacttctggctagactataaagttactcctgtttatcataaaaatgagttagttcctcgccaagtagttctacagtatgttggaattgatgaaaatggagatctacttcaaattaagttaggtagtgaaaaagaaagtgtagacaactttggagtaacatcagttacattagataacgtatctcctttagctgaattggattaccaaacaggaatgatgctagattcaactcaaaacgaagaagatagtaatttagaaaccgaagagtttgaagaagcggcttaa

SEQ ID NO: 286 - protein, 268 aa, Streptococcus pyogenes
MDMSKSNRRTWQGLVVILIAILTTFTTSTVTAARKIRNFPDTTEILLGTKATETPGILPFTGSYQLVLGDLDNLQRPTFAHIQLKDQDEPNIKRKGLKFNPPGWHNYKLTDANGKTTWLMDRGHLVGYQFSGLNDEPKNLVTMTKYLNTGFSDKNPLGMLYYENRLDSWLALHPNFWLDYKVTPVYHKNELVPRQVVLQYVGIDENGDLLQIKLGSEKESVDNFGVTSVTLDNVSPLAELDYQTGMMLDSTQNEEDSNLETEEFEEAA

SEQ ID NO: 287 - DNA, 1863 bp, Streptococcus pyogenes
atgacaatcagacaatggatggcagaccatcttcatttgatggagactttagcgtgtttggtattaataataattggcctagcctttttacactcatttccacaagtggcttccgctattttcattacagccttcttgattggaggatatgcgtctgcaaaaacgggtatattggatttggtgaagaacaaacacttgtcagtggatattttgatgattttggcagctatcggtgctggaattatcggctattggctggagggtgctctgcttatttttatcttttcgttgtccaatacgcttgaagaaatggccatggaaaaaagtaaggatgctatttcagccttgatgtccttgacgccagatacagctcgtcaataccaagaagatggccatattttagaagttgagaccagatccttgagtgttggtgaccgtttacaagttcgtaaaggcgaagctgttccaattgacgggcagttgcttagtccttttggtcaatttgatgaatctatggtcactggtgagcctatcactgttgataaggcagaaggccaggatctgattgggggaaccattaaccaaggacaaaccatagatatgttggttactattgaaaatgacgatactctctttgccaagattattaatctggtggaatctgcccaagaaaagaaaagcaaaaccgccacctttatcgaaagcttagaagatggttatgtcaaatttgtgctcgtccttattcctgcctttatcctctttagccactttgtgctttcttggacttggttggctgctttttaccgagggatgattctcttaacagtagcttcaccatgtgccctaattgccagttccacacctgctagcttggctgctatttctcgtgcagccagaaagggattgattatcaaaggaggggatattgtcgataacatgggagatattaaggctgttgtcatggataaaacgggaacgctcacccaaggaaaaccttctgttgtgaatgctcattatttggaagatgagttgctcgtgaatagactggtaaaaggagcagagactgctagtacccatcctatttctaaagcccttcttgaatacactgaaaaattggagccactgacctttgaccacttagaagaaatttctgggaaaggttttcagggcttctatcaagggcaagaatggcgaattggcaagaaaacctacattttggaaaaggttcaagacctatcagcttttgaagaaactattcaagtggaagaaaatcaagggaaaaccctaatctttgtttcacgtgaccatcaattgatagcttactatgccctcttggatgatatcaaaatagaatcaaaacgtgctattaagtctcttcatgccatgggaatcaaaacagtcatgttaacaggtgaccaagaacgaaccgccaattatgtggcacaaaaacttggtattgatgaagtggtagccaactgtatgcctcaagataaggtggctaagttagcagaattaaagactaaatatggttttgtggctatggtaggagatggtattaatgatgctcctgcccttgctcaagcagatgtttcttatgctattggatcaggaacagatattgcaatggaaagtgcagacagtgtgattatggatgacttgactcgtattccattttcgattcaactttcccgcacaatgaagaccattatcaaacaaaatattgtttttgccttatctgtgattaccttattgattttagccaatgtttttcaggtagttaacttgccgcttggtgttgttggacacgaaggctcaacgattttagtgattttaaatggcttgcgtttactttcttttaaataa

SEQ ID NO: 288 - protein, 620 aa, Streptococcus pyogenes
MTIRQWMADHLHLMETLACLVLIIIGLAFLHSFPQVASAIFITAFLIGGYASAKTGILDLVKNKHLSVDILMILAAIGAGIIGYWLEGALLIFIFSLSNTLEEMAMEKSKDAISALMSLTPDTARQYQEDGHILEVETRSLSVGDRLQVRKGEAVPIDGQLLSPFGQFDESMVTGEPITVDKAEGQDLIGGTINQGQTIDMLVTIENDDTLFAKIINLVESAQEKKSKTATFIESLEDGYVKFVLVLIPAFILFSHFVLSWTWLAAFYRGMILLTVASPCALIASSTPASLAAISRAARKGLIIKGGDIVDNMGDIKAVVMDKTGTLTQGKPSVVNAHYLEDELLVNRLVKGAETASTHPISKALLEYTEKLEPLTFDHLEEISGKGFQGFYQGQEWRIGKKTYILEKVQDLSAFEETIQVEENQGKTLIFVSRDHQLIAYYALLDDIKIESKRAIKSLHAMGIKTVMLTGDQERTANYVAQKLGIDEVVANCMPQDKVAKLAELKTKYGFVAMVGDGINDAPALAQADVSYAIGSGTDIAMESADSVIMDDLTRIPFSIQLSRTMKTIIKQNIVFALSVITLLILANVFQVVNLPLGVVGHEGSTILVILNGLRLLSFK

SEQ ID NO: 289 - DNA, 882 bp, Streptococcus pyogenes
atgataatgacgagccctttcttgttgaaagggcttgcattttttaggaaaattgatatactaaagtgtgtgtttgtgaatacagtaacaaaaggagatatcatgaaaacaccagaacagattttagaagcaactattcatattggggaacataaggttaccaaaacttttttggctaaatctatcttaggctttattggtggagcgatgattagccttggttatttactatacgtgagaattgccgccagtggtttagaaacttttggtgctttttccagtatcgtaggagcttgtgcttttccgattggtctaattattattttaatggcgggtggagaattaattacagggaacatgatggctgtttctgcagctttgttggccaaaaaaattaagtttagcgagcttgccaagaattggcttatcattaccttgtttaatgtgattggagctgtttttgtagcttttgtgtttggtcattttctaggcttaacatcagctggtatttttaaagaagaagtgattgaggtggcccatgctaaaatagcagcgagccctttgcaggcactagtatcaggaattggttgtaactggtttgttggtttggccttgtggctatgctatggggcaaatgatgctgctggtaaattccttggtacttggtttcctgtcatgacctttgtagcccttggttttcagcatagtgtagcaaatgcttttgtcattcctgctgctatttttgaaggaggagcaacatggttggattttgtcactaattttatttttgtctatagtggtaatattatcggtggagccatttttgttagttttttatattttaaagtttactatcatccgcaaaagagtaaaactcaatga

SEQ ID NO: 290 - protein, 293 aa, Streptococcus pyogenes
MIMTSPFLLKGLAFFRKIDILKCVFVNTVTKGDIMKTPEQILEATIHIGEHKVTKTFLAKSILGFIGGAMISLGYLLYVRIAASGLETFGAFSSIVGACAFPIGLIIILMAGGELITGNMMAVSAALLAKKIKFSELAKNWLIITLFNVIGAVFVAFVFGHFLGLTSAGIFKEEVIEVAHAKIAASPLQALVSGIGCNWFVGLALWLCYGANDAAGKFLGTWFPVMTFVALGFQHSVANAFVIPAAIFEGGATWLDFVTNFIFVYSGNIIGGAIFVSFLYFKVYYHPQKSKTQ

SEQ ID NO: 291 - DNA, 696 bp, Streptococcus pyogenes
atggatttttttgcaattgaccccatcggactgcctcatacctcacttatcttttacttgtcgtcactcttgatagcgcttttgcttgtttttttgacttttcaagcatataggttaaaatctcatcgttattttttcttgtttttacagttatctcaggtgattggcttatacacatggtacgtgttaagggggtttcctttagatgaagctttgccgttgtatcattgtcgcatcgctatgttagctatcttttttctacctgatcgtaacaagtttaagcaattatttatggttttggggataggtggaacattccttgcacttttatcgccagatctttatccgtttagattatggcatgtagcaaatgtctcgttttattttggtcattatgctttgttagtgaatggtttgatttacctcttgcgtttttacgatgccagtcagttaagactgctatcagtagtacgctatttagcaactgttaactttcttcttctgttggtcagtttagccacgaaaggaaattatggttttgtgatggatattccagtgattcatacgcgtcatttgctacttaattttgtgatcgttacaagtggcttgacttttatggttaaaataaccgaatatttttaccttaaatttggtgaagctcaacagctggcacttgctttctctaaagaaaagtag

SEQ ID NO: 292 - protein, 231 aa, Streptococcus pyogenes
MDFFAIDPIGLPHTSLIFYLSSLLIALLLVFLTFQAYRLKSHRYFFLFLQLSQVIGLYTWYVLRGFPLDEALPLYHCRIAMLAIFFLPDRNKFKQLFMVLGIGGTFLALLSPDLYPFRLWHVANVSFYFGHYALLVNGLIYLLRFYDASQLRLLSVVRYLATVNFLLLLVSLATKGNYGFVMDIPVIHTRHLLLNFVIVTSGLTFMVKITEYFYLKFGEAQQLALAFSKEK

SEQ ID NO: 293 - DNA, 663 bp, Streptococcus pyogenes
atgttagacgaattattaattaaaggaaaatcgtttttgagagagcggtattttctgccatacctaattagtcttttattaggactttttctaatactaagcttcagttttttgttctggggaaataggcagagcaaggcagccgttcctgctttgagagaaatatcgcctgtgaaacagcaggttagtgaagaaaaaaaggaaattcaagaagatagcagtattttagtggatttaaaaggcgccgtacaaaaagagggagtttataagctaactgctagcagtcgtgtgcgagatgtcattgaactagctggaggcctaacttcagaagctgataaacatgctattaattttgcagaaaaactaactgatgagcaagttgtttatgtacctaaacaaggagaagagatttctgtgctaccaagatcattagtttctggtaaaaaagaaactgccagcaaggatcagtcaaaggttcatattaataaggccagcttagaagaactacaacatatcccaggtattggtgctaaaagagctcaggatattattgatatgagagataagttaggtggttttaaagcgttagaagatctccgtcaggtttcggggattggcgaaaaaacgctcgagaaattaaaagatgacattttcttggactaa

SEQ ID NO: 294 - protein, 220 aa, Streptococcus pyogenes
MLDELLIKGKSFLRERYFLPYLISLLLGLFLILSFSFLFWGNRQSKAAVPALREISPVKQQVSEEKKEIQEDSSILVDLKGAVQKEGVYKLTASSRVRDVIELAGGLTSEADKHAINFAEKLTDEQVVYVPKQGEEISVLPRSLVSGKKETASKDQSKVHINKASLEELQHIPGIGAKRAQDIIDMRDKLGGFKALEDLRQVSGIGEKTLEKLKDDIFLD

SEQ ID NO: 295 - DNA, 1197 bp, Streptococcus pyogenes
atggaaaaaacaaaacgttatatcattgcaacagcagggatacttctccacttaatgttgggatcgacctatgcttggagtgtttatcgtaatccaattttacaagagaccggttgggaccaagctcctgtcgcttttgccttttctttagctattttttgtttaggtttatctgctgcttttatgggaaatttagttgaacaatatggtcctcgtctaaccggaacggtgtcagctattctttatgcttctggaaatatgctgactggtttagcgattgatcgtaaagaaatttggcttttatatattggttatggtgttattggtggcttaggacttggagcgggatatatcacaccgatatcaactattataaaatggtttccagataaaagaggcatggcaacagggtttgctattatggggtttggttttgcgtctttattaacaagtccgattgcccagtggctaattgaaacagaaggtttggtagcaacattttaccttttagggctgatttatctaatagttatgctttttgcttctcaattgataataaaaccaactgctgctgagatagctatactagataaaaaaagattacaaaataacagttatttaatcgaaggaatgaccgctaaagaagcacttaaaacaaaatcattttattgtctttgggtaattttatttatcaatatcacatgtggcttaggacttatctcagttgttgcgccaatggcacaagatctaactggtatgagtccagaaatgtcagcaattgtggttggtgctatggggatttttaacggtttcggtcgtttagtgtgggctagtttgtcagactatattggacgccgtgtgacagtaatacttttatttttagtaagcataattatgactattagtttaatatttgcacatagttccctaattttcatgataagcattgccacccttatgacttgttatggtgcgggtttttctctcattccgccttatttaagtgatctttttggggcaaaggaactggctacattacatgggtatatattgacagcttgggcaatagctgcattaactggacctatgttattatctatcactgttgaatggactcataattatcttcttaccttatgtgtttttattgtcttatacattttaggattaatggtagcattaaggttaaagaaatga

SEQ ID NO: 296 - protein, 398 aa, Streptococcus pyogenes
MEKTKRYIIATAGILLHLMLGSTYAWSVYRNPILQETGWDQAPVAFAFSLAIFCLGLSAAFMGNLVEQYGPRLTGTVSAILYASGNMLTGLAIDRKEIWLLYIGYGVIGGLGLGAGYITPISTIIKWFPDKRGMATGFAIMGFGFASLLTSPIAQWLIETEGLVATFYLLGLIYLIVMLFASQLIIKPTAAEIAILDKKRLQNNSYLIEGMTAKEALKTKSFYCLWVILFINITCGLGLISVVAPMAQDLTGMSPEMSAIVVGAMGIFNGFGRLVWASLSDYIGRRVTVILLFLVSIIMTISLIFAHSSLIFMISIATLMTCYGAGFSLIPPYLSDLFGAKELATLHGYILTAWAIAALTGPMLLSITVEWTHNYLLTLCVFIVLYILGLMVALRLKK

SEQ ID NO: 297 - DNA, 696 bp, Streptococcus pyogenes
atgaaaggattcattaattatttaaaaatagcagtgctcattattctggctatggttttcaatgtccttccgatgattttattgcaaaagcaacacgatattcctatggtacttaattggggaattggtattttctacttggttattgttggaagtgtccttattgtattatggggtctttatcaagctaagcaagacacttttattaaacagcaaaaaatgagattggttgactggggttatttagcattattttggttaatcatccgtgtgatagctattgtaggtacccttgttaaccagctatggtctggtcaacaagtgagtgctaatgatgctgcaatacataccttagctagacttatcaaaggtggtttcccgctttatactgccctatttgtacttgtgatagcttttatcgctcctattatggaagaactagtctttagaggatttcctatgattgatctcttcaaaggaaaatcacttaaggtggcaggtttagtgacctctcttgtttttgctttaccacatgccaccaatagtgttgaatttatcatgtacagctgtatgggcatttttctctttgttgcctatcaaagacgaggaaacttaaaagatgctatcttgttacatatttttaataacttgattgaagtcattttgttaatgtcaataggcttaggagtcatataa

SEQ ID NO: 298 - protein, 231 aa, Streptococcus pyogenes
MKGFINYLKIAVLIILAMVFNVLPMILLQKQHDIPMVLNWGIGIFYLVIVGSVLIVLWGLYQAKQDTFIKQQKMRLVDWGYLALFWLIIRVIAIVGTLVNQLWSGQQVSANDAAIHTLARLIKGGFPLYTALFVLVIAFIAPIMEELVFRGFPMIDLFKGKSLKVAGLVTSLVFALPHATNSVEFIMYSCMGIFLFVAYQRRGNLKDAILLHIFNNLIEVILLMSIGLGVI

SEQ ID NO: 299 - DNA, 1314 bp, Streptococcus pyogenes
atgacgattataattatggactctaatagtgctcacgagactgataatctatcagtctcttttcttaacttttgttataatagtcttatgaaacgacactttttactcttgaccttttacctctttttaacaggtttaacagctggccttgttgcttttatcttaacaaaagccattcacctgattcagtccctcagttttggattcagtcaaggttcttttagcactatgattgctagtgttccaccacaaagacgagctctttcactcctctttgctggacttcttgcaggtcttgggtggcacctattggctaaaaaaggaaaggacattcaatctattcagcaaatcattcaagatgacatctcatttagtccctggacacagttttggcatggttggctccaattaacgaccgtatctatgggagctcctgtcggccgagaaggagcttcacgggaagtcgctgttaccttgacgtctctttggagccaaagatgcaacttgtcaaaagccgatcaaaaacttttattagcctgcgcttctggcgctgcccttggtgctgtctacaatgctcccttagccactattttatttatcttagaagctattcttaaccgttggtcccttaaaaatatatacgctgcctgcctaacgagctatgtggctgtggaaacagttgctttattacaaggccgacatgagattcaatacctaatgcctcagcaacattggacgctaggaacccttattgggtccgtcctggctggtcttatcctttccctctttgctcacgcttacaaacatcttttgaaacaccttcctaaggctgatgccaaaagtcagtggtttattccgaaagttctcatcgcttttagccttatcgcaggactcagcattttcttcccagagattttaggaaatggcaaagctggattactcttttttctccatgaagaaccacatctgagctatattagctggctacttgttgccaaagctgtcgctatctctttagtttttgcttctggagcaaaagggggtaaaattgctccttctatgatgcttggaggtgctagtggcttactactagctatccttagtcagtaccttattcccttgtctctatcaaatacgttagccattatggttggtgcaacaatctttttaggtgtgatcaataagatacccttggcggcaccagtttttctggttgaaattacaggccaatcgttactaatgattatccctttagcattagctaacctcattttttattttagctatcagttttatcgtttcatccttaaatga

SEQ ID NO: 300 - protein, 437 aa, Streptococcus pyogenes
MTIIIMDSNSAHETDNLSVSFLNFCYNSLMKRHFLLLTFYLFLTGLTAGLVAFILTKAIHLIQSLSFGFSQGSFSTMIASVPPQRRALSLLFAGLLAGLGWHLLAKKGKDIQSIQQIIQDDISFSPWTQFWHGWLQLTTVSMGAPVGREGASREVAVTLTSLWSQRCNLSKADQKLLLACASGAALGAVYNAPLATILFILEAILNRWSLKNIYAACLTSYVAVETVALLQGRHEIQYLMPQQHWTLGTLIGSVLAGLILSLFAHAYKHLLKHLPKADAKSQWFIPKVLIAFSLIAGLSIFFPEILGNGKAGLLFFLHEEPHLSYISWLLVAKAVAISLVFASGAKGGKIAPSMMLGGASGLLLAILSQYLIPLSLSNTLAIMVGATIFLGVINKIPLAAPVFLVEITGQSLLMIIPLALANLIFYFSYQFYRFILK

SEQ ID NO: 301 - DNA, 810 bp, Streptococcus pyogenes
gtgaaacaaatcactcaacagaaatggttacgatacggtctttttattgctttagttttaaatggtattgaacttgaattgttaggactgactgctaacaacctttcctttaaagaagcttttgctctaatactaaccattagtctattaggcatttacttaattccatttgcagcagctattttttatttaagtaaaaaatttcatatgaacctgaacgttattattgttagctgtcttagcggactttatatttcaggttttttagcttcttgtgggaaccatctcgtaggacaattttggtcatacatcatcccttctaaagacgctttaaagctttggggagatgctttaactgcccctattgtcgaagagcccattaaggcttcttcggctattttagtaattactttatttcctagacttactcttaaagaaaaattagttgttgctttactttctggcatgggctttcaactaacagaagatatccgttatttgattcaagcaaaatctatagatagtctcgtaccgactgctattgaacgtattagcactgctgtgacttcacattgggtacatacagctatttttaccattggagcatacttattattaaagggttctaaccttttttcaaaacagcaacaaattttctggttattaagtcctctggttctacatttcatctggaactctcctctaacaagcattcctggcatgacagttttactaggaacattaatccttttaatctttggtgatctttttcaaaaaatcaacacccttgacgatgatgtgcttttttaa

SEQ ID NO: 302 - protein, 269 aa, Streptococcus pyogenes
MKQITQQKWLRYGLFIALVLNGIELELLGLTANNLSFKEAFALILTISLLGIYLIPFAAAIFYLSKKFHMNLNVIIVSCLSGLYISGFLASCGNHLVGQFWSYIIPSKDALKLWGDALTAPIVEEPIKASSAILVITLFPRLTLKEKLVVALLSGMGFQLTEDIRYLIQAKSIDSLVPTAIERISTAVTSHWVHTAIFTIGAYLLLKGSNLFSKQQQIFWLLSPLVLHFIWNSPLTSIPGMTVLLGTLILLIFGDLFQKINTLDDDVLF

SEQ ID NO: 303 - DNA, 291 bp, Streptococcus pyogenes
ttgggagaaaaaccagcagctttactcataatgttaccaaacatatcattaagattatttcggctcatgacttgttctgcattaaaggcagcctcgaaagccaaaatcgcattctcactatttgctaagacaggctcagagcccatcaataaggctctgtcttgggcagaaatgttatctagaatttcattccaagcattttttagagcatctagatattgtcgagattgttggctatttcgaaccgtttcttccatgattttcaaaatggtaacccgatcaaccctgtag

SEQ ID NO: 304 - protein, 96 aa, Streptococcus pyogenes
MGEKPAALLIMLPNISLRLFRLMTCSALKAASKAKIAFSLFAKTGSEPINKALSWAEMLSRISFQAFFRASRYCRDCWLFRTVSSMIFKMVTRSTL

SEQ ID NO: 305 - DNA, 1389 bp, Streptococcus pyogenes
ttgaaatcgggaaaagacattccagatccacatgctattgagcatgcccgtgaattggaaaaacataaggttggaatggataccttgcgtgccttagggtttgatgaagaagtgattttggatatcgttcgcactcacgatgctccaaccccattcccatcaaatgaaaaagatccgaatatgatgaaagaatggttagcaacggttatcaaacttgacttgggcagccgtaaagatcctttgcaacgtaaaggactttcactgttacccaacttagaaactttaggaattggctttacaccaatcaaagatatctcacctgttttgcaatttaaaaaattgaaacagttgttaatgacaaaaacaggggtgactgattatagatttttggataatatgccacagttagaaggcattgatatttcacaaaacaatctcaaagatattagtttcttgagcaaatataaaaacttaactctagtagcggctgctgataatggtattgaagatattaggccgcttggtcaattaccaaatctcaaattcctcgtattgagtaacaataagatttctgatttaagcccactggcatcgttacatcaattgcaagaattgcacattgataataatcagattacagatttaagccctgtttctcataaagaatcattgacggttgttgatttatcaagaaatgctgatgttgacttagcaacacttcaagcacccaaattagaaacgttaatggtcaatgataccaaggtttctcatttggatttcttgaaaaataatcctaatctatctagcctatctattaaccgtgcgcaattgcaatctcttgaaggtattgaagcaagtagcgtcattgtcagagtagaagcagaaggtaaccaaattaaatcgcttgtgcttaaagacaagcaagggtcacttactttcttggatgtgacaggcaaccagttgacttctctagaaggtgttaataattttacagcacttgacattttaagcgtgtctaaaaaccaattaacaaatgtcaacctatctaaacccaataagacagttactaacattgatattagtcataacaatatctcattagcagaccttaaattgaacgagcaacatattccagaagccattgcgaaaaacttcccagcggtttacgaaggttctatggtaggtaatggaacagctgaagaaaaagcagctatggctactaaggcgaaagaaagtgctcaagaagcatcggaatcacatgactacaaccataatcatacctatgaagatgaagaaggtcatgctcacgagcacagagacaaagatgatcacgaccatgaacatgaggatgaaaatgaagctaaagatgagcaaaaccatgctgactaa

SEQ ID NO: 306 - protein, 462 aa, Streptococcus pyogenes
MKSGKDIPDPHAIEHARELEKHKVGMDTLRALGFDEEVILDIVRTHDAPTPFPSNEKDPNMMKEWLATVIKLDLGSRKDPLQRKGLSLLPNLETLGIGFTPIKDISPVLQFKKLKQLLMTKTGVTDYRFLDNMPQLEGIDISQNNLKDISFLSKYKNLTLVAAADNGIEDIRPLGQLPNLKFLVLSNNKISDLSPLASLHQLQELHIDNNQITDLSPVSHKESLTVVDLSRNADVDLATLQAPKLETLMVNDTKVSHLDFLKNNPNLSSLSINRAQLQSLEGIEASSVIVRVEAEGNQIKSLVLKDKQGSLTFLDVTGNQLTSLEGVNNFTALDILSVSKNQLTNVNLSKPNKTVTNIDISHNNISLADLKLNEQHIPEAIAKNFPAVYEGSMVGNGTAEEKAAMATKAKESAQEASESHDYNHNHTYEDEEGHAHEHRDKDDHDHEHEDENEAKDEQNHAD

SEQ ID NO: 307 - DNA, 966 bp, Streptococcus pyogenes
atggcagaaaaaaaatggtttgataaggtactgtccaagtggcagtatgaacccattcaagtctttatgaggcatttacaaagtgcagaaatggatttatctgccattgcggttgcgtattaccttatcttaacggcctttccattaattgttattgcagccaatatttttccttacctcaatattgatattgctgatttgttacgtttaatgaagcaaaatttgcctaaagatatttttagaccggcttctgcaattgtagaaaatattttctctaaaccgtctggaagtgttttgggagtagcgactttgacaggattatggacaatgtctcgaagtttgacatcgctacaaaaagctattaataaagcctatggcgcttctcagcatcgagatttctttatcggacacttggttggtttgttgaccagtttaattattttatttttattagcctttgccttaatcttttcaatattttctaaagctgctattcaagtgctggataagcattaccatttgagtgataatatcacaacgattttcttgctcctcattcaacctattacagttttgattatttttgttggcttgatgctactatattttttattacccaatgttaagattaaaaaaattcgctacattttaccaggaaccctatttacatcttttgtgatgacatttttgagtaatctggttggcaattacgttgtgtataatgttgagcggatggtagatattaaaatgtttggttcagttatgatttttatcatcatgctatggtttattttcttagcaagaatcctgattttaggagctatatttaatgcgacctatcaagaaatgtccttggggaaattagaaggtcgtagtggtgatatgatcgctatccttaaaaaaacacttgggaatgattcagatctatctccttcacagtctatcgaagatagtcacactgattga

SEQ ID NO: 308 - protein, 321 aa, Streptococcus pyogenes
MAEKKWFDKVLSKWQYEPIQVFMRHLQSAEMDLSAIAVAYYLILTAFPLIVIAANIFPYLNIDIADLLRLMKQNLPKDIFRPASAIVENIFSKPSGSVLGVATLTGLWTMSRSLTSLQKAINKAYGASQHRDFFIGHLVGLLTSLIILFLLAFALIFSIFSKAAIQVLDKHYHLSDNITTIFLLLIQPITVLIIFVGLMLLYFLLPNVKIKKIRYILPGTLFTSFVMTFLSNLVGNYVVYNVERMVDIKMFGSVMIFIIMLWFIFLARILILGAIFNATYQEMSLGKLEGRSGDMIAILKKTLGNDSDLSPSQSIEDSHTD

SEQ ID NO: 309 - DNA, 1221 bp, Streptococcus pyogenes
atgtcaacattatcattggacaccacaaataagcgagctttagtggcagctattgcagcttcaggaacggatgacttgaatgtcatgtttcttgccttttccatgtcttccattatgacagacttgggtcttagtggcactcagggtggctggattgcgaccattaccaatttaggaatgttggtgggaggcctcttattcgggttgctggctgataggcaccacaagtttaaggtctttaaatggacgattttactgttttcagtagcaacaggattaatttattttacccagtctttgccctacctgtacctgatgcgatttattgctggcataggagttggaggtgagtacggtgtagccattgccataatggcagggattgtaccaccagaaaaaatgggtcggatgtcttctttaaatggtattgctggccagcttggctctattagttcggctcttttagcagggtggctggctccaagtctaggctggcgtggcctttttctctttggattacttccgattctcttggtgatttggatgactttagccatagatgaccaaaaaatttgggatcattatgggcaagaggaggaagaatgcagtcaaccaattaaaatcaatgaactattcaaaacaaaatccttaacagctcaaacccttgctttaatggtcatgacgactgtgcagattgcgggctattttggaatgatgaattggttgccaaccattattcaaacaagcttaaacctttcagtaaaaagttcgtccttgtggatggtggctactattgtcggcatgtgtttggggatgctgtattttggtcagcttttagattgctttggtccacgtctgatttattccctctttttattagcatcatctatttgtgtttacctttttcaatttgccaattccatggcgagtatggttattggaggtgctattgtcggtttttttgtcaatgggatgtttgctggctacggggctatgattaccagactttatccccatcacattcgatccacggctaataatgttattttgaatgttggccgtgctctaggaggattttcgtccgttgctattggtagtattttagatgcctcaggtatttcaatggtcatgattttcctagcttctctgtatgtgattagttttggagccatgtggtctattggtcagttaaaagcagaacgctaccaacaattgcgttag

SEQ ID NO: 310 - protein, 406 aa, Streptococcus pyogenes
MSTLSLDTTNKRALVAAIAASGTDDLNVMFLAFSMSSIMTDLGLSGTQGGWIATITNLGMLVGGLLFGLLADRHHKFKVFKWTILLFSVATGLIYFTQSLPYLYLMRFIAGIGVGGEYGVAIAIMAGIVPPEKMGRMSSLNGIAGQLGSISSALLAGWLAPSLGWRGLFLFGLLPILLVIWMTLAIDDQKIWDHYGQEEEECSQPIKINELFKTKSLTAQTLALMVMTTVQIAGYFGMMNWLPTIIQTSLNLSVKSSSLWMVATIVGMCLGMLYFGQLLDCFGPRLIYSLFLLASSICVYLFQFANSMASMVIGGAIVGFFVNGMFAGYGAMITRLYPHHIRSTANNVILNVGRALGGFSSVAIGSILDASGISMVMIFLASLYVISFGAMWSIGQLKAERYQQLR

SEQ ID NO: 311 - DNA, 510 bp, Streptococcus pyogenes
ttgaataggggtatggcttatttaaactactttacaaaaaccgagtgggcactttggttaagctctgtcttggccattttaattagcgcccttttattcggtaagcaagctcccttagctttaatagcttctttgattggtgtgacctctctcatttttagtgctaaagctaatcctattggtcaagggctcgtcattattttttccattatctatgcctatctttcattacgaaacagttactatggagagttaatgacctatctttttatgaccctccctatgactattttttcactttttacttggttaaaccatccttttgaagggaaaaaatcacaagtgactatttcacgattaacacccactgatcgaagatgtcttttcgtttttactatactgatcactcttattttctacagcatcttggcttctatttcaaacagcctatttacttgtctccactttatcgattgccacttctttctcagcggtttatctcagctataa

SEQ ID NO: 312 - protein, 169 aa, Streptococcus pyogenes
MNRGMAYLNYFTKTEWALWLSSVLAILISALLFGKQAPLALIASLIGVTSLIFSAKANPIGQGLVIIFSIIYAYLSLRNSYYGELMTYLFMTLPMTIFSLFTWLNHPFEGKKSQVTISRLTPTDRRCLFVFTILITLIFYSILASISNSLFTCLHFIDCHFFLSGLSQL

SEQ ID NO: 313 - DNA, 342 bp, Streptococcus pyogenes
atgattaaaacgattaaaaggagaaaccttatgaaatctattatgttagtttgtaatgccggtatgtcaactagtatgttggtgactaagatgcaaaaagcagcccaagcgcgtgaccttgaagtttctatttgggcagttcctgtgagtgaagctgacaacgaaatggctgctaatagcattgacgttctcttgttaggtccacaagtcaaattcttactaaaggattttaaagataagtttgaaccagatattaaagtagatgccattaacatggctgattatggtcttatgaacggtgaaaaagtccttgaaacagccctagcaatgatggaggagtag

SEQ ID NO: 314 - protein, 113 aa, Streptococcus pyogenes
MIKTIKRRNLMKSIMLVCNAGMSTSMLVTKMQKAAQARDLEVSIWAVPVSEADNEMAANSIDVLLLGPQVKFLLKDFKDKFEPDIKVDAINMADYGLMNGEKVLETALAMMEE

SEQ ID NO: 315 - DNA, 816 bp, Streptococcus pyogenes
ttgaccaaacgtaatattaccattaccttaccagataatgtaccacctgcggttaataaagcctttgctgccattattccaggaacagttgcgatttacgcttcggcaattttcgcctacctcattttcgcattaacaggttcttccctaagtgatgtcatttcaacctatatccaattaccattgctaggcttatcacagggtattggttcagttatcttgttaaccttcttagttcaactgctctggttcttcggcttgcatggtcataatgtcttagccccagtgatggatggtatttatatggtagctttaacagaaaatacagctgcttacaatacagcgcatagcgctgctaatttaccatacctttggacacgcgggtcctttgatgcttatgctcaaatgggtggttcaggagtaaccttggcattgattattgctatcttcatattctcaaaacgagaagagcataaaaccattgccaaattgtccgcaccaatgggtgttttcaatatcaacgaaccaattacatttgggatgccaattgttttgaatccaacctttgtgattccatggctaattgtgccaccaatttgtgctagcatagcttattttgctactgcaataggtttgattccaccggtattcttatcagtaccttggattacccctgttggactttatgcttacctagctactggaggtaatattatggcaggtttggtttcactgtttaacctctttgttgccttccttatctgggcaccatttgtcattttggccaataaagaaaaagcgagtgaccttgcatga

SEQ ID NO: 316 - protein, 271 aa, Streptococcus pyogenes
MTKRNITITLPDNVPPAVNKAFAAIIPGTVAIYASAIFAYLIFALTGSSLSDVISTYIQLPLLGLSQGIGSVILLTFLVQLLWFFGLHGHNVLAPVMDGIYMVALTENTAAYNTAHSAANLPYLWTRGSFDAYAQMGGSGVTLALIIAIFIFSKREEHKTIAKLSAPMGVFNINEPITFGMPIVLNPTFVIPWLIVPPICASIAYFATAIGLIPPVFLSVPWITPVGLYAYLATGGNIMAGLVSLFNLFVAFLIWAPFVILANKEKASDLA

SEQ ID NO: 317 - DNA, 2175 bp, Streptococcus pyogenes
atgacgcacaaaataaaagtattgctgcttgcgataatgtctatttttttgacatgcaatattgcaagtgctgaaactattgctattgtttcagatacagcttatgccccatttgaatttaaagactcagatcaaatttacaaaggaattgacgttgatattattaatgaagtagccaaacgtcaatcttgggatttcagtatgagtttcccgggttttgatgcagctgtaaatgctgttcaatctggtcaagcgagtgctctaatggccggtacaaccattacgaatgctcgtaagaaagtctttcatttctcagagccatattacgataccaaaattgtcattgcgacacgtaaagccaatgccatcaaaaaatacagtgacttaaaaggaaaaacggtcggtgttaaaaatggaacagcggctcaagcctttttgaataactataaaaaaaagtatgattatactgttaaaacatttgacacaggtgatcttatgtataatagtttatctgctggttctattgccgctgttatggatgatgaggcggttatccaatacgcaatcagccaaaaccaagatattgctattaacatgaaaggagagcccattggaagctttgggtttgctgtcaaaaagggaagcggatatgattatctagttaatgatttcaatacagctcttaaagctatgaaagctgatggtacctaccaagctatcatgaccaagtggttaggcacagatgataaagctaccaccagtcaggcaacgggaaatccatctgccaaagctacacctacaaaggacagttataaaattgtctctgattcgtcttttgcaccgtttgaatttcaaaatggtaagggcaaatacgttggtattgacatagaattaatcaaagctattgctaaacaacaaggtttcaaaattgaaatcgctaatccaggtttcgatgctgccttaaatgctgtgcaatctagccaagcagatggggtcattgctggtgcaactattactgacgctcgtaaagctatctttgatttttctgatccttattatacttctaatatcattttagctgttaaagctggaaaaaacatcaagaactatgaagacttagacagaaaaacagtcggtgctaaaaacggcacttcatcttactcttggttaaaagaaaacgctcctaaatatggttataatgtcaaggcatttgatgatggttctagcatgtatgatagcttaaattcaggttctgtagatgctatcatggatgatgaggcggttcttaaatacgctatctctcaaggtcgtcgctttgaaacacctcttgagggcatttctactggtgaagttggttttgctgtcaagaaaggaactaatccagaattaatcgaaatgttcaacaatggcttagctgctctcaaaaaatctggtcagtatgatgacattatagataaataccttgactctaagaaagctgcaactccttctgaaaaaggtgctgatgagtctactatttcaggcctattatcaaataactacaaacaactattggcaggacttggaaccacgctcagtttaacccttatttcatttgctattgctataattatcgggatcatctttgggatgatggccgtgtcaccaactaaatcacttcgacttatttcaacggtctttgtggacgttgttcgagggattcctttgatgattgtggctgccttcattttctggggagtaccaaaccttatcgagagtatgaccggccaccagtcaccgattaatgatttcttagctgctacaattgcactgtcacttaatggcggagcctatattgctgaaattgttcgcggtggtatcgaagctgttccagcagggcaaatggaagctagtcgaagtcttggtttgtcttacggaaccacgatgagaaaagtaattctcccacaagctgtgaaactaatgttacctaactttatcaatcagtttgttatttcattgaaggatacaacaatcgtctcagcaattggtttagtggaactcttccaaacaggtaaaatcattattgctagaaattaccagtcgttccgtatgtatgctattttagcaattatttaccttatcatgattatactcttaacaagacttgcaaaacgtttagaaaagaggcttaactaa

SEQ ID NO: 318 - protein, 724 aa, Streptococcus pyogenes
MTHKIKVLLLAIMSIFLTCNIASAETIAIVSDTAYAPFEFKDSDQIYKGIDVDIINEVAKRQSWDFSMSFPGFDAAVNAVQSGQASALMAGTTITNARKKVFHFSEPYYDTKIVIATRKANAIKKYSDLKGKTVGVKNGTAAQAFLNNYKKKYDYTVKTFDTGDLMYNSLSAGSIAAVMDDEAVIQYAISQNQDIAINMKGEPIGSFGFAVKKGSGYDYLVNDFNTALKAMKADGTYQAIMTKWLGTDDKATTSQATGNPSAKATPTKDSYKIVSDSSFAPFEFQNGKGKYVGIDIELIKAIAKQQGFKIEIANPGFDAALNAVQSSQADGVIAGATITDARKAIFDFSDPYYTSNIILAVKAGKNIKNYEDLDRKTVGAKNGTSSYSWLKENAPKYGYNVKAFDDGSSMYDSLNSGSVDAIMDDEAVLKYAISQGRRFETPLEGISTGEVGFAVKKGTNPELIEMFNNGLAALKKSGQYDDIIDKYLDSKKAATPSEKGADESTISGLLSNNYKQLLAGLGTTLSLTLISFAIAIIIGIIFGMMAVSPTKSLRLISTVFVDVVRGIPLMIVAAFIFWGVPNLIESMTGHQSPINDFLAATIALSLNGGAYIAEIVRGGIEAVPAGQMEASRSLGLSYGTTMRKVILPQAVKLMLPNFINQFVISLKDTTIVSAIGLVELFQTGKIIIARNYQSFRMYAILAIIYLIMIILLTRLAKRLEKRLN

SEQ ID NO: 319 - DNA, 825 bp, Streptococcus pyogenes
ttggtaacttattataataaggatttagtgcctcaagcacctaaaagctttactgaattagaagtcttacaaaaagattctaagtttgcttttgcctctgaaccaggaaaatctgtaggtttcttggcgaaatggacagacttctattatggttatggtttaattgccggttatggcggttatatctttggtgataaaggaaccaaaccaagtgatttaggcctaggtaacgacggaactgttgaagggttaaactacgcgaaacagtggtatggcacttggcctcaaggaatgcaagacactaaaaaagctggtgattttatcactgaacaatttatttctaaaaaagctggtgtcattattgatggtccatgggcagctagctcctttaaagatgctggtgttaactttggggtaatggaaattcctactttgacaaatggtaaaaaataccaaccgttcgcaggtggtaaagcttgggttatttcaaactattctaaaggaaaaacgactgctcaaaaattccttgattatgtgaccaatgctgaaaaccaaaaacgtttctatgataaaacacaagaaattccagctaacttaacagcacgtaactatgcttctaaagagggtaatgagttaacgaaagctgtgattagtcagtttgagagcgcacaaccaatgccaaatattccagaaatggctgaagtttgggaaccaggtgcaaatatgttctttaacgtggcttctggtaaggaagaagcatctaaagctgcaaaagaagcagcaaaaactattaaggaagctattgaacaaaaatacgctgaataa

SEQ ID NO: 320 - protein, 274 aa, Streptococcus pyogenes
MVTYYNKDLVPQAPKSFTELEVLQKDSKFAFASEPGKSVGFLAKWTDFYYGYGLIAGYGGYIFGDKGTKPSDLGLGNDGTVEGLNYAKQWYGTWPQGMQDTKKAGDFITEQFISKKAGVIIDGPWAASSFKDAGVNFGVMEIPTLTNGKKYQPFAGGKAWVISNYSKGKTTAQKFLDYVTNAENQKRFYDKTQEIPANLTARNYASKEGNELTKAVISQFESAQPMPNIPEMAEVWEPGANMFFNVASGKEEASKAAKEAAKTIKEAIEQKYAE

SEQ ID NO: 321 - DNA, 1308 bp, Streptococcus pyogenes
atggtagagaaccaaagacaacagaagcctaataaagccatgtggctatctgttatcccaggtttgggacaactatacaataaacaaatcgttaaagggggagtcttattagttgttttcttcctagagctactagaaattgtagttctaggaattcctgctttaacaggtctttacagtcttggaagtgttccaatgcaagatcactccttatttatgttaattaagggggccatgcaattaattactctagtcttatttggtatttttcatttggttgctatgagagatgctaaattagttgcacatcaaatgaatgaaggcaagaaggttccggtgacggctaaagagacccttgaagcgatttatgaaaaaggatttccttacttgctcatcattccggcttatttagcaatggctttcgctattatttttccagttttagtgaccttgctgattgcttttaccaattacgattttaggcatattcctccgtatcgtttattggattgggtagggttgaagaattttcttaatatcttagaattaagcaccttcaaaacagcatttacatctgttttgtcatggacgctgatctggacattagcagcgacaagtcttcaaattgttattggaattgcaacggctgttattgctaatcaatcctttatcagaggaaaacgtctctttggtgtgatattcttgttaccatgggctgttccagcatttatctctattatgagttttggtaatttctttaatgattccattggggccatgaatgttcaggttcttcctttcatcgagaaattccttcctttcgttgacttcggaattgtgtcctggaagacagaccccttctggacaaaagtggctgttattatggtgcaaggttggctaggatttccctatatctatattttggtatcaggtattttacaggcaattccagctgatttatacgaagcagcaaccgttgatggtgcgacagtcttacagaaattccgccatatcaccatgccaatgatttttgcggttgcagcaccaacctttatctctcagtacacctttaacttcaataatttctctattatttatctgtttaataatgggggccctggtactgtggggggcggagctgggacaactgatattctgatttcttggatttacaagttgaccacacaaacctcgcctcaattttcgatggcgtcggcaatgaccttaatcatctctgtaataatgatttcggtatcattgattacctttaagaaatttaaagcttttgatatggaggagagatcatga

SEQ ID NO: 322 - protein, 435 aa, Streptococcus pyogenes
MVENQRQQKPNKAMWLSVIPGLGQLYNKQIVKGGVLLVVFFLELLEIVVLGIPALTGLYSLGSVPMQDHSLFMLIKGAMQLITLVLFGIFHLVAMRDAKLVAHQMNEGKKVPVTAKETLEAIYEKGFPYLLIIPAYLAMAFAIIFPVLVTLLIAFTNYDFRHIPPYRLLDWVGLKNFLNILELSTFKTAFTSVLSWTLIWTLAATSLQIVIGIATAVIANQSFIRGKRLFGVIFLLPWAVPAFISIMSFGNFFNDSIGAMNVQVLPFIEKFLPFVDFGIVSWKTDPFWTKVAVIMVQGWLGFPYIYILVSGILQAIPADLYEAATVDGATVLQKFRHITMPMIFAVAAPTFISQYTFNFNNFSIIYLFNNGGPGTVGGGAGTTDILISWIYKLTTQTSPQFSMASAMTLIISVIMISVSLITFKKFKAFDMEERS

SEQ ID NO: 323 - DNA, 861 bp, Streptococcus pyogenes
atgagaaagacttatgtttcaatatccatgaaacgcaaacgtttcttcacccaattattgacttatctctatctaatctccttagtgatcgtgattttattcccaatactagtgacggtcagttcagcttttagaccaggaaataccacagcctttagttttcattttgatgggccatggaccttgtctaactttaaaacactctttcaagataccttatacttaagatggtattggaataccttgatcgtggcattcttcaccatgctcatacaagtaacagtcatcactttgacaggttatgcgtatagccgttacaatttctttggacgcaaaaaaagtttaatctttttcctagtcgtacagatggttcctaccatggcggctttaacggcttactttgttatggcgtggctctttaatgccttaaaccaatactggttcttgattttgatttacgtcggtggtggtattcctatgaatgcctggttgatgaagggttattttgacacggtaccttatgacttggacgaatctgctaagttagatggttctggacactttaggaccttctaccaaattgtccttcctcttgtgcgaccaatgattgcagtacaatccttatgggcttttatgggtcctttcggagacttcatgttggctaaattccttttaagggcgcaagaaaattatacggtagcagttggtcttcaatcgtttattacgaatgatgctagaaatcccaaggtaaccttatttgctgcgggagctattctgattgcagtgcctatttcagttctctttttcttcctacagaaaaatttcgtttccggtttaacaagtggtggtaccaaagggtaa

SEQ ID NO: 324 - protein, 286 aa, Streptococcus pyogenes
MRKTYVSISMKRKRFFTQLLTYLYLISLVIVILFPILVTVSSAFRPGNTTAFSFHFDGPWTLSNFKTLFQDTLYLRWYWNTLIVAFFTMLIQVTVITLTGYAYSRYNFFGRKKSLIFFLVVQMVPTMAALTAYFVMAWLFNALNQYWFLILIYVGGGIPMNAWLMKGYFDTVPYDLDESAKLDGSGHFRTFYQIVLPLVRPMIAVQSLWAFMGPFGDFMLAKFLLRAQENYTVAVGLQSFITNDARNPKVTLFAAGAILIAVPISVLFFFLQKNFVSGLTSGGTKG

SEQ ID NO: 325 - DNA, 816 bp, Streptococcus pyogenes
atgccagataaaaaacaatttcctatttcttacatttcacattgcctttctcctagggcaatgtttgccagccgagctcagtttacttggtggcaaaatcttcttattattgtttttttgaacgccttaataatgattccagttacgttacactatgctaacatgacaacgtatcccttggaacggattgtaactaagagtttgtcgcctatcacagacaaaacctatcaagcattgacccaaggaaagattgagaaagatacgtttcagggtcaatctctgattcgacgagatggtgaattggttttggctgttttaccgacaaaggtcgatttagagcaattggcatcagaatcaaccagacaaattattgtgacaaaaaaagaatggcgttttgttacccctgatggcaaggaactccgtgctcacgttagaggccagcagcagtcactcgctgacctgacaacagttaaagcagtgaaggactttgtcaatcagcaatggtatgacagtaataaagccagtgtacttggttttcttttgctgacgtttgttctcatggtgtgtgtgggtacccttattgtgattggtctaggcgctttctttttgactctgactaaacgatcacgactatttatgattcgaaacttctctgaaggacttggattgatggttaattgtttggcttggccgagtctactggcgattgctcttagtttctttattcaggatccagtactgattatgaattgccaagtatttggtaccttattaatgctgacctgggtgttctacaaaacacagtttagagattga

SEQ ID NO: 326 - protein, 271 aa, Streptococcus pyogenes
MPDKKQFPISYISHCLSPRAMFASRAQFTWWQNLLIIVFLNALIMIPVTLHYANMTTYPLERIVTKSLSPITDKTYQALTQGKIEKDTFQGQSLIRRDGELVLAVLPTKVDLEQLASESTRQIIVTKKEWRFVTPDGKELRAHVRGQQQSLADLTTVKAVKDFVNQQWYDSNKASVLGFLLLTFVLMVCVGTLIVIGLGAFFLTLTKRSRLFMIRNFSEGLGLMVNCLAWPSLLAIALSFFIQDPVLIMNCQVFGTLLMLTWVFYKTQFRD

SEQ ID NO: 327 - DNA, 837 bp, Streptococcus pyogenes
atgaaaaacaaacgtcgatttcaacttggacttgtttatgctactttaatcatcctctcaatcatttggctcttcccaatcgcttgggttattcttactagcttccgtagcgaaggaactgcttacgtcaattattttattcctaagacttttacattaaatcactacattaatctttttactaatgaaacctttccttttggaaaatggtttatgaatactcttattgtagccacttttacatgtattatttcaaccttcataactgttgccatagcctactctcttagccgaattaagtttaagtttcgcaatggctttttaaaactagcccttattttaaatatgttccctggtttcatgagcatgattgccatctactatatcttaaaggccttaggtttgacgcaaaccctaacagcacttgtccttgtttattcctcaggtgcagcccttggtttttacattgcaaaaggattttttgataccattccttattcacttgatgaatcagctatgattgatggcgctactcgtatggatattttctttaaaataacccttcctttagcaaaaccaatcattgtctatactgcccttcttgcttttatggggccttggattgactttatctttgcacaagttattttaggtgatgctacaagtaaatataccgttgctattggactattttcaatgcttcagccagataccattaacaactggtttatggccttcactgctggttctgtcttaattgccgtcccaatcactctcctcttcatgtttatgcaaaaatactatgttgaaggcatcacaggtggttctgttaaataa

SEQ ID NO: 328 - protein, 278 aa, Streptococcus pyogenes
MKNKRRFQLGLVYATLIILSIIWLFPIAWVILTSFRSEGTAYVNYFIPKTFTLNHYINLFTNETFPFGKWFMNTLIVATFTCIISTFITVAIAYSLSRIKFKFRNGFLKLALILNMFPGFMSMIAIYYILKALGLTQTLTALVLVYSSGAALGFYIAKGFFDTIPYSLDESAMIDGATRMDIFFKITLPLAKPIIVYTALLAFMGPWIDFIFAQVILGDATSKYTVAIGLFSMLQPDTINNWFMAFTAGSVLIAVPITLLFMFMQKYYVEGITGGSVK

SEQ ID NO: 329 - DNA, 1362 bp, Streptococcus pyogenes
atgactcagtcaaacttgacaccaaatatatctgtaatagaagccttaaaaagaggcagttgggatattaaactttcgagtattatcatgggatttgccaactttgctaacaaacagtttatcaaaggaatcttatttttaataagtgaacttatctttctagtagcttttgtctcccaaatcatccctgctatccgtggccttgtcactcttggtactcaaactcagggaatgactacaaaaactattgatgggattaacatccaagttgctgttgatggcgataactctatgttaatgcttatttttggtttagcatcactcattttctgcctagtctttgcttacatttactggtgtaatctcaaaagtgctcgtaacctttatcttttcaaacaaaaaggtcagaagataccaagcttcaaagaagatcttgccacacttacaaatggtcgctttcatatgactttaatggctatcccactgattggtgtgcttttattcaccattcttcctttgatttacatgatctgtttggcctttaccaattttgatcataatcacttgcctccaaaatctttatttgattgggtgggacttgctaactttggaaatgttttaagcggccgtatggcaggaaccttttttcctatcttctcatggactttgatttgggctgtttttgccacagtaactaatttcttctttggtattattcttgctttgttaatcaataccaaaggattaaagtggaaaaaaatgtggcgaaccatctttgttatcaccattgcagttccacaattcatctcattattgattatgcggaacttactcaatgacgaaggcccactaaatgctcttctcaataaaatcggcttgattaatggctcactgccatttttatctgatcctctttgggcaaaattctcaatcatttttgtcaacatgtggatcggtattccatttaccatgctgattgcgactggtattatcatgaaccttccaagtgaacaaattgaggctgctgaaattgatggcgctagcaaattccaagtcttcaagtctatcacgttccctcaaattctcttgatcatgacaccaaacttgattcaacaatttatcggaaatatcaataactttaacgtcatttacctccttactggtggtggtccaacaaattcagaatactatcaggcaggaacaacagacttgctggtcacttggctttataaattaaccgtcacagctgctgactacaatttagcttctgttatcggtatcttaatctttacagtttcagctatctttagcttacttgcttatacaaggacagcatcctacaaggaaggagcggctaaataa

SEQ ID NO: 330 - protein, 453 aa, Streptococcus pyogenes
MTQSNLTPNISVIEALKRGSWDIKLSSIIMGFANFANKQFIKGILFLISELIFLVAFVSQIIPAIRGLVTLGTQTQGMTTKTIDGINIQVAVDGDNSMLMLIFGLASLIFCLVFAYIYWCNLKSARNLYLFKQKGQKIPSFKEDLATLTNGRFHMTLMAIPLIGVLLFTILPLIYMICLAFTNFDHNHLPPKSLFDWVGLANFGNVLSGRMAGTFFPIFSWTLIWAVFATVTNFFFGIILALLINTKGLKWKKMWRTIFVITIAVPQFISLLIMRNLLNDEGPLNALLNKIGLINGSLPFLSDPLWAKFSIIFVNMWIGIPFTMLIATGIIMNLPSEQIEAAEIDGASKFQVFKSITFPQILLIMTPNLIQQFIGNINNFNVIYLLTGGGPTNSEYYQAGTTDLLVTWLYKLTVTAADYNLASVIGILIFTVSAIFSLLAYTRTASYKEGAAK

SEQ ID NO: 331 - DNA, 786 bp, Streptococcus pyogenes
atgtttggaaaattattaaaatacgaatttagatctattggaaaatggtactttgcgcttaatgctttcgttattgccatcgctgccattttgtcatttacgataaaactgtttgctcaaagcaatagtgatggactatttggagtactaaccaataagatgttgcctctgacattaggtttaacttttggctccctgatcgctggttccctcttatcaacattacttatcattatcaaacgtttcagcaaaagtgtttttggatgggaaggatacttaacgttgactttacccgtcaattcgcatcaaattattttatcaaaactactagcttcttttatttgcagtgttttcaatactatcatccttgcatttgctatcgctattgtaattgtaccaatgtttaacatcaacgaactattagaaggattctttaatagttttaagatggattatttcatcaatatgctaactgtactagcctatgtcctattatcaacatttacgagtatcttattaatttatctttccatttctataggtcaacttttttccaatcggcgaggcttgatggcctttattgcatattttatattagttattctgattagcgttgctgcaacatatgttcacagtcacatctttaatattaatacaagtgccgatagtttcccatttactgagcaaaaaacaatttatcttcttattttggaacaatttattgaaatgataatgttttacctcgccactaattttattatcaaaaataaactcaacctacagtaa

SEQ ID NO: 332 - protein, 261 aa, Streptococcus pyogenes
MFGKLLKYEFRSIGKWYFALNAFVIAIAAILSFTIKLFAQSNSDGLFGVLTNKMLPLTLGLTFGSLIAGSLLSTLLIIIKRFSKSVFGWEGYLTLTLPVNSHQIILSKLLASFICSVFNTIILAFAIAIVIVPMFNINELLEGFFNSFKMDYFINMLTVLAYVLLSTFTSILLIYLSISIGQLFSNRRGLMAFIAYFILVILISVAATYVHSHIFNINTSADSFPFTEQKTIYLLILEQFIEMIMFYLATNFIIKNKLNLQ

SEQ ID NO: 333 - DNA, 558 bp, Streptococcus pyogenes
atggtaaagcgagattttataagaaatatattattgttattaattgtgattattggggctattttgttgagaatctttgttttttcaacttttaaagtttctccagaaacagctaatacttatttaaagagtggtgatttagtcacaatcaaaaaaaatattcagcccaaatataaagattttgtggtttatagagttggaaaaaaagattatgtcagtcgagtcattgctgttgaaggcgatagcgtgacttatatggacgatattttttacctcaataatatggtagagtcacaggcttaccttgaaaagatgaaagcacattacttgaatcatgcaccgtttggcacattgtatacagatgattttacagttgctaccatcacagctgataagtatcaaaaagttcctaaggggaagtatcttcttttgaatgataaccggaaaaatacgaatgacagtcgtcgatttgggttaataaatgcctcgcagattaaaggtttagtgacctttagagttttgcctctcagcgattttggatttgtagaagtagagtag

SEQ ID NO: 334 - protein, 185 aa, Streptococcus pyogenes
MVKRDFIRNILLLLIVIIGAILLRIFVFSTFKVSPETANTYLKSGDLVTIKKNIQPKYKDFVVYRVGKKDYVSRVIAVEGDSVTYMDDIFYLNNMVESQAYLEKMKAHYLNHAPFGTLYTDDFTVATITADKYQKVPKGKYLLLNDNRKNTNDSRRFGLINASQIKGLVTFRVLPLSDFGFVEVE

SEQ ID NO: 335 - DNA, 642 bp, Streptococcus pyogenes
atgacctatattcagcaagttttacccagcttattagatggtgccttggtgactttacaagtattctttattgttatcattctttctatacccttaggggctattttagctttcttgatgaagattccctttaaaccgctacagtggtttttgaccctatacgtgtggatgatgcgagggacaccattactacttcaattgatttttttctattatgttttgccaagtgtggggattagttttgatcgaatgccagctgctattttggcgtttactttgaattatgctgcctactttgctgaaatttttagaggtgggattgaggctattccaaaaggtcaatatgaagcagctaaagtattaaagttaaaacctcttcaaaccattcgttatattattttgcctcaagtgtttaaaattgtgttaccaagtgttttcaatgaagtcattaatttggtcaaagattcttcccttgtctatgtactcggtgtaggagatcttttattagcaagtaagacggcagccaatagggatgcaaccttagcccctatgtttatcgctggtcttatctatttgcttttaattggactggtcacgattatttcaaaacaagttgaaaaacggtttaattattatcagtaa

SEQ ID NO: 336 - protein, 213 aa, Streptococcus pyogenes
MTYIQQVLPSLLDGALVTLQVFFIVIILSIPLGAILAFLMKIPFKPLQWFLTLYVWMMRGTPLLLQLIFFYYVLPSVGISFDRMPAAILAFTLNYAAYFAEIFRGGIEAIPKGQYEAAKVLKLKPLQTIRYIILPQVFKIVLPSVFNEVINLVKDSSLVYVLGVGDLLLASKTAANRDATLAPMFIAGLIYLLLIGLVTIISKQVEKRFNYYQ

SEQ ID NO: 337 - DNA, 774 bp, Streptococcus pyogenes
atgaaacccaaacaccttctctgtctttcaacagttgttgctggattagctttattttcaactatgacgcactcagttttagctgatgatgcttcaaatcccgatgctattttaatgaataacaaccaagcaaattttcaaagagatgctctagtgcaaaagcttgatgagggacatcaacaattagaagctattaaacatgaagctaaaggtactgatattgagactactgttaacaaagctatcgatgctgttgatcacatgaagagttctatacgcttcaatactgaaacgatctatgattttagttcaattggggcaagagtagaagcattatcagatgctatcaaagcaatcgtattttccacaacccaattaactcataaagtagaaaaagcgcatactgatatggggtttgctattactaaattagtcattcgtattatagatccatttgcatctgttgacgctatcaaagctcaagtacaagaaattaaagcacttgaggaaaaagttatcaattatcctgatttacagccaacagaccgtgctactatctatactaaagctaaactaaataaagctatttggaacactcgtttagaaagagataaaaaggttttgggaatcaaaccatttgacgtttacaatagacttaacaaagctatcacacatgcggttggtgtccaactaaatccgacaaccactgttcaacaagttgacgatgaagttattgctgtgcaagatgctttggaaacagctcttaagtcatag

SEQ ID NO: 338 - protein, 257 aa, Streptococcus pyogenes
MKPKHLLCLSTVVAGLALFSTMTHSVLADDASNPDAILMNNNQANFQRDALVQKLDEGHQQLEAIKHEAKGTDIETTVNKAIDAVDHMKSSIRFNTETIYDFSSIGARVEALSDAIKAIVFSTTQLTHKVEKAHTDMGFAITKLVIRIIDPFASVDAIKAQVQEIKALEEKVINYPDLQPTDRATIYTKAKLNKAIWNTRLERDKKVLGIKPFDVYNRLNKAITHAVGVQLNPTTTVQQVDDEVIAVQDALETALKS

SEQ ID NO: 339 - DNA, 1236 bp, Streptococcus pyogenes
atgacacaggatccgattgcaaatttaaaactagccagaaagggcccaatcgttagtattattgtctacttgtcgcttagtgttgccaaattattagctggttatttgttaaatgcaagttcccttattgctgatggatttaacaatttatcggatattgtgggaaatgtagccctgcttattggtcttcacttagctagccaaccagccgatgccaatcataaatttggtcattggaaaattgaagacttatccagccttgtcacttcttttattatgtttcttgtaggtttccaagtactgattcacacaattaaaagtatctttagtggtcagcaagttgatattgaccctcttggggctattgtcggtatcgtttcagcttttgttatgttaggggtttatgtctttaacaaacgtctttccaaacgtgtaaaatccagtgccttagtcgctgcttctaaggataatctagctgatgctgttacttctatcggaacatcaattgctattatagcagcttctttgcatttaccagttatcgatcatatagctgctatgatcattacgttctttattcttaaaacagcttttgatatctttatggaaagttcgtttagtttatctgatggatttgatagccgtcatttgaaaaaatacgaaaaagccattttagaaatccctaaaattgtcgccgttaagtctcaacgagctaggacctatggtagcaatgtctatcttgatattgtacttgaaatgaatcctgatctttcagtctatgaaagtcactctattacagagaaagtggagcagttattgagtgaccaattttctatttatgacattgacattcacgttgagcctgccatgattcccgaagaagagatttttgataatgtcgccaaaaagctctaccgctacgaaaaattaattttgagtaaggttcctgactatgaccactacattgctaagtctttccaactgattgatgcgaatggccaaacagttaactatgaacaatttttgaaccaagaaatttattatccaagtaacttcaaccattttcagattgaatccattagtcaaaaaacgatgttggtaacttaccaattaaatggcaatcaacgtaccagtatttggaggcgtcatgaatcttggtccttactcttccaccaaattacccctatcgctaagaaacaattacatcacacacactatcgtattgtaaaaatgtaa

SEQ ID NO: 340 - protein, 411 aa, Streptococcus pyogenes
MTQDPIANLKLARKGPIVSIIVYLSLSVAKLLAGYLLNASSLIADGFNNLSDIVGNVALLIGLHLASQPADANHKFGHWKIEDLSSLVTSFIMFLVGFQVLIHTIKSIFSGQQVDIDPLGAIVGIVSAFVMLGVYVFNKRLSKRVKSSALVAASKDNLADAVTSIGTSIAIIAASLHLPVIDHIAAMIITFFILKTAFDIFMESSFSLSDGFDSRHLKKYEKAILEIPKIVAVKSQRARTYGSNVYLDIVLEMNPDLSVYESHSITEKVEQLLSDQFSIYDIDIHVEPAMIPEEEIFDNVAKKLYRYEKLILSKVPDYDHYIAKSFQLIDANGQTVNYEQFLNQEIYYPSNFNHFQIESISQKTMLVTYQLNGNQRTSIWRRHESWSLLFHQITPIAKKQLHHTHYRIVKM

SEQ ID NO: 341 - DNA, 957 bp, Streptococcus pyogenes
atgggttcagttgaacgtacattaaaaatgaccttggctaccattgttgccattttaattgcttaccaacttcatctggattatgcaatgtcagcggggatcattgccctgttaagtgttttagacacccgtaagtccagtttggtggtcgctaggaatcgcttgctatcttttttcctggcttttgggattgcgatgatgtgctttagcttgtttggttttacgacagtaggttttatgtgttatttgttaattattattcctttgctctatcactttcagatagaggcaggactggttcctataacagtacttgtgacacatttgattgctaaaaaaagtattgcattacctattttatcgaatgagtttatgctcttttttgtagggactagtgtcgctttactatttaatgcttatatgggtccacaagatcagcaaattcggtactatcaccaaaaagttgaatcggatctgaaaggtatcttataccgttttgaaagctttctactggaaggaaaaggtcaaaatgaagggctcttgatcaaaaaccttgataaaatattagatgaagctctaaaactagtttatcgagaaaggcataatcaactatttcagcagaccaattatcaagttcattattttgagatgcgacgacaacaaaatagactattgggacaaatggctatcaacgtaaacacgttaatgagacaaagtaaggaaagtattcttttgtcacatctttttcacgaaactgcttgtcagctaagcgaacaaaatccggctttaaccttgattgatgacatcgaacaattgcttgaaacctttcgtcatggtgatcttcctcaaactcgggaggaatttgagcgacgtgcggttttatttcagctcttacaagacttagagcgctttatcttattaaaggtagagttttatcaggattatcaaaatgactaa

SEQ ID NO: 342 - protein, 318 aa, Streptococcus pyogenes
MGSVERTLKMTLATIVAILIAYQLHLDYAMSAGIIALLSVLDTRKSSLVVARNRLLSFFLAFGIAMMCFSLFGFTTVGFMCYLLIIIPLLYHFQIEAGLVPITVLVTHLIAKKSIALPILSNEFMLFFVGTSVALLFNAYMGPQDQQIRYYHQKVESDLKGILYRFESFLLEGKGQNEGLLIKNLDKILDEALKLVYRERHNQLFQQTNYQVHYFEMRRQQNRLLGQMAINVNTLMRQSKESILLSHLFHETACQLSEQNPALTLIDDIEQLLETFRHGDLPQTREEFERRAVLFQLLQDLERFILLKVEFYQDYQND

SEQ ID NO: 343 - DNA, 936 bp, Streptococcus pyogenes
atggaaaatcaggaattggctaaaaaattagcctcaccatcaaagaattcaaggcttgaaacctttggccgcaccattacgtttttgtgtctggctttgattgtttttatcgttgcgatgattctgatcttcgttgctcaaaaagggttgtcaaccttctttgttgacaaggttaatctttttgatttcttgtttggaaaggagtggcaaccaagtgtaaaaaatgcggccggcattccttatcttggtgctctgccaatgattacaggatcctttttggttaccattttatctgctattattgccaccccatttgccattggcgcagccgtttttatgactgaaatctcacctaaatatggcgctaaattattacagcctgcggttgagcttttggttggaattccttcggttgtttatgggtttatcggtttgcaagtgattgttccttttatgcgctctatctttggtggcacaggttttggaatcctatctggggtctgtgtcttgtttgttatgattttaccaacagtgacttttatgacaacagacagtctgcgggcggtgcctcgtcattaccgcgaagcgtctatggctatgggagcaacacgttggcaaaccatttggcgtgttgtccttaatgcagctcgtccaggaatttttaccgctgttatttttggaatggcaagagcttttggagaagccttggctatccaaatggtagtcggtaactctgctgtaatgccaagttcactaacgacaccagccgcaaccttaacgtctgtcttgacaatgggtattggtaacacggttatgggaacggtccaaaataatgtgctttggtcccttgccctagtcttattattaatgagtctggccttcaattcccttgtcaaattaatcacgaaagaaagaaagagaaattatgaacgctaa

SEQ ID NO: 344 - protein, 311 aa, Streptococcus pyogenes
MENQELAKKLASPSKNSRLETFGRTITFLCLALIVFIVAMILIFVAQKGLSTFFVDKVNLFDFLFGKEWQPSVKNAAGIPYLGALPMITGSFLVTILSAIIATPFAIGAAVFMTEISPKYGAKLLQPAVELLVGIPSVVYGFIGLQVIVPFMRSIFGGTGFGILSGVCVLFVMILPTVTFMTTDSLRAVPRHYREASMAMGATRWQTIWRVVLNAARPGIFTAVIFGMARAFGEALAIQMVVGNSAVMPSSLTTPAATLTSVLTMGIGNTVMGTVQNNVLWSLALVLLLMSLAFNSLVKLITKERKRNYER

SEQ ID NO: 345 - DNA, 888 bp, Streptococcus pyogenes
atgaacgctaaaaaagtcgataaagtagcaactggtactctttataccattgctggaattattgtagctattttagcttccttaattctatatatccttgtccgtggcttgccacacatcagctggtcctttttaacaggaaaatcgtcttcgtacgaagctggtgggggaattggtatccagttgtataattccttcttcctattgattgttactttaattatttccattcctttatcaactggagcggggatttacttggctgaatatgccaaaaaaggacctgttaccaactttattagaacctgtattgagattctgtcttccctaccatctgtggttgtggggctctttggttacttgattttcgttgtgcagtttgaatatggcttttctattatttcaggggctcttgctttgacggtctttaatcttcctcaaatgacccgtaatgttgaagatagtttactgcatgttcatcatacccaaagagaagcaggattagctttaggcctgtcacgctgggaaacggttttttatgtggttatcccagaagctctcccgggaatggtaacaggtattgtcttagcttcaggtcgtatttttggtgaagcggcagcgcttatctatactgctggtcaatcagcaccagctctggattggtcaaattggaatccacttagtgttactagtccaatctctattttccgtcaatctgagacccttgctgttcatatttggaaagtcaatagcgaagggacaattccagatgctactcttgtatccgcaggaagtgcagcagtgctattaatttttatccttattttcaacttttcagctcactttattgggaagaaacttcattctaaaatgacagcagcgaaataa

SEQ ID NO: 346 - protein, 295 aa, Streptococcus pyogenes
MNAKKVDKVATGTLYTIAGIIVAILASLILYILVRGLPHISWSFLTGKSSSYEAGGGIGIQLYNSFFLLIVTLIISIPLSTGAGIYLAEYAKKGPVTNFIRTCIEILSSLPSVVVGLFGYLIFVVQFEYGFSIISGALALTVFNLPQMTRNVEDSLLHVHHTQREAGLALGLSRWETVFYVVIPEALPGMVTGIVLASGRIFGEAAALIYTAGQSAPALDWSNWNPLSVTSPISIFRQSETLAVHIWKVNSEGTIPDATLVSAGSAAVLLIFILIFNFSAHFIGKKLHSKMTAAK

SEQ ID NO: 347 - DNA, 312 bp, Streptococcus pyogenes
ttgatatatgcattaagggcttcttctaccatctgtttcacagcttttcccataaggttgatttgttcttcaaccactggaatacgctcctcacctttcatacgaatagtggccttggcaatcgaagcagcatggtcacccatacgttcaatatcacttgatgcctttaaaacagtaataaccattctaagatcattcgaaactggctgttgtagggcaataatttccagcgatttcttttcaagctttgtctcaaaattattaatagtgtcatcttcttcgataacttctttggccaattcacgatcatga

SEQ ID NO: 348 - protein, 103 aa, Streptococcus pyogenes
MIYALRASSTICFTAFPIRLICSSTTGIRSSPFIRIVALAIEAAWSPIRSISLDAFKTVITILRSFETGCCRAIISSDFFSSFVSKLLIVSSSSITSLANSRS

SEQ ID NO: 349 - DNA, 1311 bp, Streptococcus pyogenes
atgaataaattaaaaaaagagattttatcagataactataaccacttttttcatttttttgcggtttttacaggtatttttgtcattatgactattattatcttacagattatgcggtttggcgtttattcgtcagttgacagtagtttagtttctgttagtaataatgcaagtagctatgctaatcgtacgatggctagaatatcttctttttactttgatactgaaaataacattattaaggcgctgcctgattcagatagttctaagttattaggaacgcctgcagctaatacagatatcattttgtttagtgctaatggaacaattttaaatgcttttgatgcgttttctaactatcaaaattttcatttagataaacgccggttggggagtattgaaaccaccagtttaatgaatttttatggacaagaagaaaaataccatacgataactgtaggggttcatatcaaaaattatcctgcagttgcctatatgatggcagtagtaaatgtggaacaattagaccgcgctaatgaacgttatgagcgcattattattatagttatgagtgttttttggctaatttctattttagcaagtatttatttagccaagtggagcagaaaacctattttagaaagctatgaaaaacaaaaaatgtttgttgaaaatgctagtcatgaattaaggacccctttggcggtcttacagaatcgtctggaatcgctttttcgtaagcccaacgaaacgatattagaaaatagtgagcatctcgcttctagtttagacgaggttcgcaacatgcgcatcttaacaactaatttattaaatttagcaagacgagatgatggcattaatccacagtggactcatttagatacagatttttttaatgctatttttgagaattatgaactagttgctaaagaatatggaaaaatattttattttcagaaccaagtcaatagatcgttaagaatggataaggctttactaaaacaattaataacgattttatttgacaatgctattaaatatacagataaaaatggtattattgaaattatagtgaaaacaacggacaaaaatttattaatttctgttattgataatggtccagggataacagatgaagaaaagaaaaagatttttgatcgtttttatcgagttgacaaagctagaacacggcaaacaggtggatttggcttggggttggctttagctcagcaaatcgtgatgtctttaaaaggaaatattacagtaaaggataatgatcctaaaggtagtatttttgaagtcaaactataa

SEQ ID NO: 350 - protein, 436 aa, Streptococcus pyogenes
MNKLKKEILSDNYNHFFHFFAVFTGIFVIMTIIILQIMRFGVYSSVDSSLVSVSNNASSYANRTMARISSFYFDTENNIIKALPDSDSSKLLGTPAANTDIILFSANGTILNAFDAFSNYQNFHLDKRRLGSIETTSLMNFYGQEEKYHTITVGVHIKNYPAVAYMMAVVNVEQLDRANERYERIIIIVMSVFWLISILASIYLAKWSRKPILESYEKQKMFVENASHELRTPLAVLQNRLESLFRKPNETILENSEHLASSLDEVRNMRILTTNLLNLARRDDGINPQWTHLDTDFFNAIFENYELVAKEYGKIFYFQNQVNRSLRMDKALLKQLITILFDNAIKYTDKNGIIEIIVKTTDKNLLISVIDNGPGITDEEKKKIFDRFYRVDKARTRQTGGFGLGLALAQQIVMSLKGNITVKDNDPKGSIFEVKL

SEQ ID NO: 351 - DNA, 969 bp, Streptococcus pyogenes
gtggtaaataagatgagtttagtaacaatttttgccttattgatgtcatctatgcttatttatgcaacaccactcattttcacaagtattggaggaactttctcagagcgctcaggcgttgttaatgttggtttagaaggtatcatggtcatgggagcgttctctgggattgttttcaacttagagtttgctgaaacatttggaaaagcaacgccttggatagccgttttagtcggtggtattgttggtttgattttttctttgattcacgctgtagcaaccatcaactttcgagctgaccacattgtcagtggtacagtgttgaacttgttagcaccttcttttgctgtcttcttggttaaagctatgtacggtaagggacaaacagacaacattcaacaatcttttgggaagtttgatttcccaggtttatcacaaattcctgtgattggtgatattttctttaaaaatactagccttattggttacttcgccattgctttttcgttctttgcttggtttttgctttataaaaccaggtttggtctgcgtttacgatcagttggggaacaccctcaggcagctgacacacttggtattaacgtctatttgatgaaatactatggtgtgatgatctcaggttttcttggtggaataggtggagctgtttatgctcagtcaatctccgttaactttgctgtaacaactatcttaggtcctggatttattgctttggcagctatgatctttggtaaatggaatccagttggcgccatgctatctagtcttttctttggcttatcgcaaagtttagccgttattggtgctcaattaccattactagaaaagattccaacggtttacttacagattgcaccttatatggtaacgattattattttagctgctttctttggtcaagcagttgcaccaaaagctgatggaatcaactatattaaatctaaataa

SEQ ID NO: 352 - protein, 322 aa, Streptococcus pyogenes
MVNKMSLVTIFALLMSSMLIYATPLIFTSIGGTFSERSGVVNVGLEGIMVMGAFSGIVFNLEFAETFGKATPWIAVLVGGIVGLIFSLIHAVATINFRADHIVSGTVLNLLAPSFAVFLVKAMYGKGQTDNIQQSFGKFDFPGLSQIPVIGDIFFKNTSLIGYFAIAFSFFAWFLLYKTRFGLRLRSVGEHPQAADTLGINVYLMKYYGVMISGFLGGIGGAVYAQSISVNFAVTTILGPGFIALAAMIFGKWNPVGAMLSSLFFGLSQSLAVIGAQLPLLEKIPTVYLQIAPYMVTIIILAAFFGQAVAPKADGINYIKSK

SEQ ID NO: 353 - DNA, 1578 bp, Streptococcus pyogenes
atgattatcaaaaagaaagcaaaagtaaaatatttgctccataaagggaaacatggatttttaagaggaatttttagtagaacaacaatcattgtattattaattattttgcaattagttttcttatttcaatcttatgcctggatggagcagtaccgtgtttggataacgattcttgaaagtgtctttgctattactattgttttatatttagttaatagtgatatggatgctatttcaagaatgacgtggttaattttgattatgattgctccattaccagtgtcactgtttttaatttatacaaaattggattggggttacagagggctaaaacaaagaataaatcatcttgtagatctgtctgcaccttaccttagcgatgatgacgctatattagaggtattaaaggatagcacatcaaccacatatcatttagtacagtacttagaaagaagtcgtggcaactttccgatttataataatacaagggtaacttacttcccaacaggtgaaactttttttgatagtttaaaagaacagttattcttagctaaaaagtacatttttcttgaattttttattattgcagaaggccaaatgtggggagaaatccttagtattctagaaaaaaaagtcagtgaaggtgtagaagttagggtgttgtttgatggcatgaacgaactatcaacgctatcatcagattacgccaagagattagaacaaatagggattaaagctaaatcatttttaccgatttcaccctttatctctacctattacaattatcgagatcaccgaaaaattgtcgttattgatggggaggtatcattcactggaggtattaatctagcagatgagtacattaatgaagtagagcgttttggccactggaaagatgctggtttaatgcttgagggtgaagcaacagacagctttttaattttgtttttacaaatgtggtctatcacagaaaaagaactgattattgatccttatctttcagatcattctttaaaacttccttcagatggctatgttattccctacggtgattccccgcttgatactgataaaataggtaaaaatgtttatatagacattttaaatcatgctaaagagtacgtttatatcatgacaccttaccttattttagatagcgagatggaacacgctttacggtttgcatcagaacgtggagtagatatccgaattattatgccaggagtgccagataagggggtaccatatgccttagctaaaacctattataaagctttgatgtcttctggagtaaaaatttatgagtatcaaccagggttcgttcattcaaaggtatttatctctgataatacaaaagcagttgtcggaacaattaacttagactatcgtagcctttatcatcattttgaatgcgcgacttatttatatcgtgtgtcagttattgctgatattgtgaatgactttaatgaagctcaaaagcaatcactattgatgacatcagatcatttgacgcaacgtccttggtatcaaaaattgataggattattagtacgaataattgcccctctcttgtaa

SEQ ID NO: 354 - protein, 525 aa, Streptococcus pyogenes
MIIKKKAKVKYLLHKGKHGFLRGIFSRTTIIVLLIILQLVFLFQSYAWMEQYRVWITILESVFAITIVLYLVNSDMDAISRMTWLILIMIAPLPVSLFLIYTKLDWGYRGLKQRINHLVDLSAPYLSDDDAILEVLKDSTSTTYHLVQYLERSRGNFPIYNNTRVTYFPTGETFFDSLKEQLFLAKKYIFLEFFIIAEGQMWGEILSILEKKVSEGVEVRVLFDGMNELSTLSSDYAKRLEQIGIKAKSFLPISPFISTYYNYRDHRKIVVIDGEVSFTGGINLADEYINEVERFGHWKDAGLMLEGEATDSFLILFLQMWSITEKELIIDPYLSDHSLKLPSDGYVIPYGDSPLDTDKIGKNVYIDILNHAKEYVYIMTPYLILDSEMEHALRFASERGVDIRIIMPGVPDKGVPYALAKTYYKALMSSGVKIYEYQPGFVHSKVFISDNTKAVVGTINLDYRSLYHHFECATYLYRVSVIADIVNDFNEAQKQSLLMTSDHLTQRPWYQKLIGLLVRIIAPLL

SEQ ID NO: 355 - DNA, 1224 bp, Streptococcus pyogenes
atgacgaatttaacgttttatgcaaaaatcggtatttcagaagaagagcatgactcttttgttaaagaacatcagcaaattagcgttttacaaggtagtgattgggcaaaaatcaaaaatcaatggcagaatgagcgaattggtatctataaagaggaaaagcaggttgcctctttatcacttttgattaagctattgccacttggaagaagcattatttatattccaagagggccagtcatggattatcttgaccgtgatttggtggcatttaccatgaaaacactaaaggattatggtaaaactaaaaaggccctctttatcaaatatgatccagctatcctgttaaaacaatacgcactgggacaggaagaagaagaaaaacctttagctttagcagctattaagaatctccaagaagctggtgttcattggactggtttaacaatggagattgcagatagtatccaacctcgtttccaagctaatatttacactcaagaaaaccttgagatgcaatttcctaagcataccagacgtttaataaaagatgctaagcagcgtggtgtaaaaacatatcgtgtcagtcaatcagaacttcacaaattttccaagattgtctccttaacagaaaaacgtaaaaatatttctttgcgtaacgaagcttactttcaaaagttgatgactacttatggggataaggcctacttacatctagcaaaagtgaatattcctcaaaaactagatcaataccgccagcaattaattcttattaaccaagatattactcgcacccaagctcatcaaaagaagcgtttaaaaaaattagaagatcaaaaagcttctttagaacgttatataactgaatttgaaggctttacagaccaatatcctgaggaagttgttgtagcaggtatattatctatttcttatggaaatgttatggaaatgctttatgctgggatgaatgatgattttaagaagttttatcctcagtatctgctgtatcctaatgtttttcaggatgcttatcaagatggtattatttgggctaacatgggaggagtagaaggctcgcttgatgatggacttaccaaatttaaggccaactttgctccgacaatagaagaatttataggagaatttaatctccctgtcagcccactttatcatattgctaataccatgtacaaaatacgaaaacagttaaagaataaacattaa

SEQ ID NO: 356 - protein, 407 aa, Streptococcus pyogenes
MTNLTFYAKIGISEEEHDSFVKEHQQISVLQGSDWAKIKNQWQNERIGIYKEEKQVASLSLLIKLLPLGRSIIYIPRGPVMDYLDRDLVAFTMKTLKDYGKTKKALFIKYDPAILLKQYALGQEEEEKPLALAAIKNLQEAGVHWTGLTMEIADSIQPRFQANIYTQENLEMQFPKHTRRLIKDAKQRGVKTYRVSQSELHKFSKIVSLTEKRKNISLRNEAYFQKLMTTYGDKAYLHLAKVNIPQKLDQYRQQLILINQDITRTQAHQKKRLKKLEDQKASLERYITEFEGFTDQYPEEVVVAGILSISYGNVMEMLYAGMNDDFKKFYPQYLLYPNVFQDAYQDGIIWANMGGVEGSLDDGLTKFKANFAPTIEEFIGEFNLPVSPLYHIANTMYKIRKQLKNKH

SEQ ID NO: 357 - DNA, 1434 bp, Streptococcus pyogenes
atgctaagaaaaaagagaattttgggtttatttcgacttgttgaattaattttcctaggattattgttgagtttagttgtttcgtaccttgcgtggaccaatagttttgcaacacttcataatatattagcaactgtcggaatagtggaacgaagcaaagatcaacagcctcgctatcacattggacaagctattcaagtacaaaaaagtggtccatatcatcaatggattggaactattaataaacaggtagaagatatagccgaaaattaccgagtgagttatcattatgaagtggtatttccaataggaaaagtcactgtttctttgccagaacataacctgaaagagcctgataaaccgaggtttaaaaaaggagatatcgttaaattatcttcattaactaaaaagccacatataaaagtatatcaaggtcaattagcgactattaaacaagttaaaaaatgctatgactattcgttaggaggatatcagtacgatattaatctgaaagataatctaagattagatggaatttcagagcaagattttgttaaaccttattatattaggttcaataaaggaaattcccctgagcaaaacaatcgtcttttgcgaaaagctttcgcttatgcaaagcagcatccaaatagcgttatatcttttccaaaggggcaatttcacattggctctttgccttcacaaaaagattattttgagcttccatctgatacagctattattggtcatcagacagagttcattattcacggtaaaatgttgtggtttggattccctacaggaccaaaggctgaacaaggtgttcgtaatctcgtgttgactggagtgcatttcaaagcaaatgatttgaaaaaaggagaccactttatgattatggctgatcatggtactgattggcatatttacgataacaaatttactatggttcataagcgtaatagtcatatttttgatttaggatctctacaaaattcattgtttgagaaaaaccaatttattggctatgcgccagaattagtacaagaccaacagctgctatcaaaggctcaagggcatgattttttttcagaagtcattcagtttgatgctgctgttcatcattttgcatgggatggaggtctacttagtaatattgctccaaactatgaagcatttaaccaaactcgacatctatgtcacaatattactgtaagccaaaatcaatttttaccttatatagatccgactggttgcctgagagcctatagtggttctattggtcagcattcctcaaaagtaggagttattagggttttaaataatgtttttacctcatccattgttactaaagcgaagctcactagttggtttatggaacctattcattttccaccaaattcaccggttattgtcgcaggtaatatcattaattga

SEQ ID NO: 358 - protein, 477 aa, Streptococcus pyogenes
MLRKKRILGLFRLVELIFLGLLLSLVVSYLAWTNSFATLHNILATVGIVERSKDQQPRYHIGQAIQVQKSGPYHQWIGTINKQVEDIAENYRVSYHYEVVFPIGKVTVSLPEHNLKEPDKPRFKKGDIVKLSSLTKKPHIKVYQGQLATIKQVKKCYDYSLGGYQYDINLKDNLRLDGISEQDFVKPYYIRFNKGNSPEQNNRLLRKAFAYAKQHPNSVISFPKGQFHIGSLPSQKDYFELPSDTAIIGHQTEFIIHGKMLWFGFPTGPKAEQGVRNLVLTGVHFKANDLKKGDHFMIMADHGTDWHIYDNKFTMVHKRNSHIFDLGSLQNSLFEKNQFIGYAPELVQDQQLLSKAQGHDFFSEVIQFDAAVHHFAWDGGLLSNIAPNYEAFNQTRHLCHNITVSQNQFLPYIDPTGCLRAYSGSIGQHSSKVGVIRVLNNVFTSSIVTKAKLTSWFMEPIHFPPNSPVIVAGNIIN

SEQ ID NO: 359 - DNA, 666 bp, Streptococcus pyogenes
ttggcacacctgagcgtattcaatatggtgataaggttgttgctcttattgaataccgtgacggtagcctcatggatgtggtttacaatgtgtaaagacacttatttttcaggcgaagctatccaacttagtgatatgttaagagcccgcgaagaaagagctctgcgtcagctgcatttattaaaggagtacccagaaggtagcttattatcggtcaccatgaatatccctggaccaattaaaacctctcctaaacttcttgaagcttttgatatagtgattaaggccattcaaactgccttagctgacgataagatttgttaccagttgcgattactgcctacaacgggttatgagtattacctcatcacaagtctacctagccgcgacctgaagttaaaaatgatagccttagagacagagttgccaataggtcgtctcatggatttagatgtcttggtcttgcaaaatgatctgcctcattcaattagcagaaccgtattaggaggctcccctaggcaatgttttatctgttctaaagaggccaaagtctgcggtcgcctacgtaagcacagtgtcgaggagatgcagactgctatttcaaaattactccattcatttttcaataaagacaaccaatcatcgtcatcagataagacaggttga

SEQ ID NO: 360 - protein, 221 aa, Streptococcus pyogenes
MAHLSVFNMVIRLLLLLNTVTVASWMWFTMCKDTYFSGEAIQLSDMLRAREERALRQLHLLKEYPEGSLLSVTMNIPGPIKTSPKLLEAFDIVIKAIQTALADDKICYQLRLLPTTGYEYYLITSLPSRDLKLKMIALETELPIGRLMDLDVLVLQNDLPHSISRTVLGGSPRQCFICSKEAKVCGRLRKHSVEEMQTAISKLLHSFFNKDNQSSSSDKTG

SEQ ID NO: 361 - DNA, 1053 bp, Streptococcus pyogenes
gtggacactttaatcgcaggaataacctccatcaccattcctcaaattgttatgatggtcattggtgccctcttaatgtatctaggaattaaaaaagaatacgaaccaaccttacttgtccccatgggacttggaaccattctcgttaacttccctggttcaggagttttaacacaagtggttaacggagtcgagcaagaaggggtttttgaggctctcttcaattttgggattggaacagaacttttcccactgttgattttcattggtataggagccatgattgactttggccccttgcttcaaaacccattcatgctcttgtttggtgatgcagctcaattcggaattttctttgttgtggttgttgccgtactggctggctttgacattaaagaagcagcttcaatcggcattatcggagcagcagacggaccgacttctatctttgttgccaaccaactggccaaggatttactgggtccaattacggttgcagcctattcttacatggctctggttcctattatccaaccatttgccattaaattagtgacaacgaaaaaagagcgccgtatccgtatgacttacaaagctgagaatgtatctcaaatgactaaaatcttattcccaatcatcattaccttagtagcagggttcatcgccccaatttctctacctttagttggctttttgatgttcggtaacttattacgggagtgtggtgtgctcgatcgcctgtcacaaactgctcaaaatgaattggtaaacattattagtatcttgcttggattgaccatctctattaaaatgcaggcagacctgttcttaaatgtacagacactcttaatcatcgtctttggtttacttgcttttatcatggattctatcggtggggtcatgtttgccaaatttctcaatctcttccgaaaagagaagattaatccaatgattggcgctgcgggtatttcagcttttccaatgtcaagtcgtgtcattcaaaaaatggcacagatgaagacccgcaaaactttatcctcatgtatgctgtag

SEQ ID NO: 362 - protein, 350 aa, Streptococcus pyogenes
MDTLIAGITSITIPQIVMMVIGALLMYLGIKKEYEPTLLVPMGLGTILVNFPGSGVLTQVVNGVEQEGVFEALFNFGIGTELFPLLIFIGIGAMIDFGPLLQNPFMLLFGDAAQFGIFFVVVVAVLAGFDIKEAASIGIIGAADGPTSIFVANQLAKDLLGPITVAAYSYMALVPIIQPFAIKLVTTKKERRIRMTYKAENVSQMTKILFPIIITLVAGFIAPISLPLVGFLMFGNLLRECGVLDRLSQTAQNELVNIISILLGLTISIKMQADLFLNVQTLLIIVFGLLAFIMDSIGGVMFAKFLNLFRKEKINPMIGAAGISAFPMSSRVIQKMAQMKTRKTLSSCML

SEQ ID NO: 363 - DNA, 1425 bp, Streptococcus pyogenes
ttgaaaaaggagataacaatgatgttattaacaatgctggcttatgccatgattattgtctttatgtacgtggtaatgaagaaaaaaatgaccccttttactgctttggtcatgattccattaatcatgacgattgctgttatactgactggttcagctgacttcaatgcagatgccaaatttgttgcctttgttggtgacggtggaattgctaaagacctaacagctatcggaccaatggttatgtatggtatcaacaatactgctaaaacaggtatcatgttgctatttgccattttgttcttctctgtcatgttagatgcaggattgtttgatccgattactgaaaagatgattcgctttgctaaaggtgatccaatgaaggtgcttatcgcaacagctgtcgttgctgctgcagtatctcttaatggtgatggaacaaccactactttaatttgttgctctgctttcttacctatctataaaaaattggacatgaaaatcatgaacctaggtgtcttgattattcttcaaaatactattatgaacttactgccatggggtggccctactgctcgtgcgatgtctgttcttggtgtcggtcctgaaattcttggctatcttgcaccgggtatgattttatctcttctttatgtgatttgttgggttgctccaagcatggggcgtaaagaacgtgcaagacttggtgttattgacttgtctgaagaagacatgcgtcaactcacagacattactgacccagataccctttttattcgtcgtcctaaaaactttgttttcaatgctatcttaaccattggattaatcacttggttagttgctggctctttcaacaaatctattgctatggcaccgcttcttctttttgcggtgggaacttgtatcgccttgatggtcaattacccagtgcttaaagatcaatcaaaacgcattggtgacaatgctggtgatgcggttcaagtggttattctcgtctttgctgctggtatctttatgggtctttttcaaggttctggtatggctagcgctcttgcacaaagttttgcaaccattattccaaaacaactggcaggtttctggggtctcgttattgccttagtttctgcacctggtaccttctttatctccaatgatggtttttactatggtatcttgcctgttcttgcagaagctggtgctgaatatggtttcagtaacatggctatggcacttgcttccctcatgggacaagccttccacttacttagtccattagttgccttcatttatcttcttcttcgcttgacaggtcttgacatgggggaatggcaaaaagaggctgctaaatatgcccttatcatctttgttatctttgtggtaaccattattgccatgggacaaatgccactttacattccacaataa

SEQ ID NO: 364 - protein, 474 aa, Streptococcus pyogenes
MKKEITMMLLTMLAYAMIIVFMYVVMKKKMTPFTALVMIPLIMTIAVILTGSADFNADAKFVAFVGDGGIAKDLTAIGPMVMYGINNTAKTGIMLLFAILFFSVMLDAGLFDPITEKMIRFAKGDPMKVLIATAVVAAAVSLNGDGTTTTLICCSAFLPIYKKLDMKIMNLGVLIILQNTIMNLLPWGGPTARAMSVLGVGPEILGYLAPGMILSLLYVICWVAPSMGRKERARLGVIDLSEEDMRQLTDITDPDTLFIRRPKNFVFNAILTIGLITWLVAGSFNKSIAMAPLLLFAVGTCIALMVNYPVLKDQSKRIGDNAGDAVQVVILVFAAGIFMGLFQGSGMASALAQSFATIIPKQLAGFWGLVIALVSAPGTFFISNDGFYYGILPVLAEAGAEYGFSNMAMALASLMGQAFHLLSPLVAFIYLLLRLTGLDMGEWQKEAAKYALIIFVIFVVTIIAMGQMPLYIPQ

SEQ ID NO: 365 - DNA, 651 bp, Streptococcus pyogenes
atgaaccaaacctttaaacaaagtttacccttatcttttagtgaggaagtagcaaacagcgtgacacacgctatcggagcatttgctatgctcattctacttcctatttcagccagctatgcttatcaaacttatgaccttaaagccgctattggtatctccatctttgtcatcagtctctttttgatgtttttgtcctctacgatttaccactccatggcttatggttcggttcacaaatacattctacgcattattgatcacagtatgatttatattgctatcgcaggaagttatacacctgttgccttatcccttgtttctggttggctaggctatatcattattgttttgcagtggggcattacgctttttgggattttatacaaaatttttgccaaacgtatcaatgaaaaattcagtttgatgctttatatcgttatgggctggctcgttgtgtttatcttgccagtcatcattcaaaaaactagtcttgcttttggtcttctcatgttatttggtggcttgtcttataccattggagcggtattttatgccaaaaaaagaccctacttccacatgatttggcatctctttattttattggcctctgccctccaatttatcgctatcactttctttatgctttaa

SEQ ID NO: 366 - protein, 216 aa, Streptococcus pyogenes
MNQTFKQSLPLSFSEEVANSVTHAIGAFAMLILLPISASYAYQTYDLKAAIGISIFVISLFLMFLSSTIYHSMAYGSVHKYILRIIDHSMIYIAIAGSYTPVALSLVSGWLGYIIIVLQWGITLFGILYKIFAKRINEKFSLMLYIVMGWLVVFILPVIIQKTSLAFGLLMLFGGLSYTIGAVFYAKKRPYFHMIWHLFILLASALQFIAITFFML

SEQ ID NO: 367 - DNA, 369 bp, Streptococcus pyogenes
atgactaaaaaaaatcatggcgttttttgggggttgttgcttggatcagcagcagctagcattgcttacttaagtttatcgtcttccaaaaaagatcaactcttgaaagatagtgctaaaaaaatagatgatctcaacgcttacttgcaagataaaagtaagcaagttctggatgcagtatcggaaaaagtccaagaatccaaagatgctgttgaagtttacggtggtatcgccgcagaaacagttgaagaatctttgggacaggctaaagaaaaggtagaaggaattggcgaagctactagccaaactatccaatctaaaatggaaaaactcactagcgataagacagatgctgatgatgaaaaatag

SEQ ID NO: 368 - protein, 122 aa, Streptococcus pyogenes
MTKKNHGVFWGLLLGSAAASIAYLSLSSSKKDQLLKDSAKKIDDLNAYLQDKSKQVLDAVSEKVQESKDAVEVYGGIAAETVEESLGQAKEKVEGIGEATSQTIQSKMEKLTSDKTDADDEK

SEQ ID NO: 369 - DNA, 918 bp, Streptococcus pyogenes
atggctggacttttttcagtaggtcagctaaccacttttttaaatgttgttgtccaatataccaaacctttcaacgatatttcatctgtcttggcagagatacagagttctttagcttgtgcgcaaaggctttatgaccttttagatattgaaataaaagagcaagagcactttctaacatttaaggcatcagcggttaaggggcaaattgactttgaagaagtaagtttttcttatcaaaaagacaggcccttactgaaagatattaatttttctgttcctgcgggttccaaggtagcgattgtagggcctacaggtgcaggtaaatcaactttaatcaatttactcatgcgcttttatgaacttgatgctggtagcatcaagttagataaagttcctattaagtgttatgctaaggaagaacttaggtccattactggcatagtattgcaagaaacctggttgaaagatgcgactgttcatgagttgattgcttacggcagtgaagaggctagccgtgatgaagtagtggcagcagccaaagcagctcatgcacacttctttattatgcaacttcctaagacttatgatacttacttaagtgcttctgatgatgctttgtcccaagggcagctccagttattagctattgccagaatgtttttgaaaaaaccaaaagtcttggttctagatgaagccacctcctctattgatattagaacagaagctgttattcaagaggcactaaaagaactcatgagaggaaggaccagctttatcattgcccatcgtttatcaacgattcaatcagctgatttgattcttgttatggatcaaggtcgattggttgagtggggaacacatgccagcttaatgtcaaaaaacgcctgttatgctagattacaaaagatagaataa

SEQ ID NO: 370 - protein, 305 aa, Streptococcus pyogenes
MAGLFSVGQLTTFLNVVVQYTKPFNDISSVLAEIQSSLACAQRLYDLLDIEIKEQEHFLTFKASAVKGQIDFEEVSFSYQKDRPLLKDINFSVPAGSKVAIVGPTGAGKSTLINLLMRFYELDAGSIKLDKVPIKCYAKEELRSITGIVLQETWLKDATVHELIAYGSEEASRDEVVAAAKAAHAHFFIMQLPKTYDTYLSASDDALSQGQLQLLAIARMFLKKPKVLVLDEATSSIDIRTEAVIQEALKELMRGRTSFIIAHRLSTIQSADLILVMDQGRLVEWGTHASLMSKNACYARLQKIE

SEQ ID NO: 371 - DNA, 1725 bp, Streptococcus pyogenes
atgaaacgattacgtccatatgtgaaagggtacctaaaagaaagtatcttaggtcctctttttaaattattagaagctttatttgaattattagtccctttgttaattgctaacatgattgatatatcgattagtcaacacaacagccagggaattttgagggttgttttaacattatttggtttagcaaccattggcttattgctttccgttacagcccagtatttttcttcgaaagcagctgttggttttacaagacaaatgacagatgacttgtttaaaaaaatcatgtttttgagcaaggaggaccaagaccatcttggttatgctagtctgttatcacgattgaccagtgatagttttcaaattcaaactggtatcaatcaatttttgcgtctttttctaagggcccctattatcgtatgtggtgctatggtaatggcttattggattagtccaagtctaaccctatggtttgtgatgatggtgattgtcttactaacacttgtttttgttatgtcacatttattaggtcccctttatctcttaatccgccgagaaacagatcacttggttcgtttgactagccaacagttacaaggaatccgagtaattaaggcttttaatcaaacccaaaaagaactccaagcatttaagcagcaaaatatgctcttaagtcgccaccaatatcaagctgctaccctagccaatgtcttgaatcctatgacttttttagtggtcaatcttaccctgttaatcttgatttggcaaggaagttggcaagtagctcatagatcgcttagtcagggcatgttggttgctttaattaattacctcttgcagattttggcagaacttttgaaaatgaccatgttgatgggaaccatcaatcaaagtgtaacagccgcaaaacggattaatcaggtgtttgttttagctgatgaagcgcctttgcccttacttaaagatggtcctatttcaactcatctgttgaccatccggcacttgacctttacttatccaggagcagcagagccaagtctgtatgatattcagttaagtgctgatcagggagaatggattggcatcattggtggtactggagcaggcaaaacgactttgattgacttgatctgccaaacttattcacaatatagtggtgagattagtcttaattggcaaggagaagtgccaaaaacactaaccgagtggcgaaatgtgattgctcttgttcctcaaaaagctcaattatttaaaggaacgattagaagtaacctcctactgggacaatcaatgcctattagtgatgaggaactgtggcgggctcttgaattggctcaagcaaaagagtttgtcgctgccttaccagaacaattagaggcacctgttgaagccttcggccgtcatttttcaggagggcaacggcaacgtctagctattgccagagcacttctgaagccaaaacccattttgattttggatgatgccagttccgccttagacaatgagactcgaggacgactttttaaagctctaaaagaagagttatcagatgttttagtgattctagtcacgcaatctattaagaatttgcagtttgctgataagattttagtgttggaacagggccatcaattggattttgccagtcatgaccagttaaaagtaagcaatgcactttatcaagaaatgctagcgctttacgtgaagggggagcaaaaatga

SEQ ID NO: 372 - protein, 574 aa, Streptococcus pyogenes
MKRLRPYVKGYLKESILGPLFKLLEALFELLVPLLIANMIDISISQHNSQGILRVVLTLFGLATIGLLLSVTAQYFSSKAAVGFTRQMTDDLFKKIMFLSKEDQDHLGYASLLSRLTSDSFQIQTGINQFLRLFLRAPIIVCGAMVMAYWISPSLTLWFVMMVIVLLTLVFVMSHLLGPLYLLIRRETDHLVRLTSQQLQGIRVIKAFNQTQKELQAFKQQNMLLSRHQYQAATLANVLNPMTFLVVNLTLLILIWQGSWQVAHRSLSQGMLVALINYLLQILAELLKMTMLMGTINQSVTAAKRINQVFVLADEAPLPLLKDGPISTHLLTIRHLTFTYPGAAEPSLYDIQLSADQGEWIGIIGGTGAGKTTLIDLICQTYSQYSGEISLNWQGEVPKTLTEWRNVIALVPQKAQLFKGTIRSNLLLGQSMPISDEELWRALELAQAKEFVAALPEQLEAPVEAFGRHFSGGQRQRLAIARALLKPKPILILDDASSALDNETRGRLFKALKEELSDVLVILVTQSIKNLQFADKILVLEQGHQLDFASHDQLKVSNALYQEMLALYVKGEQK

SEQ ID NO: 373 - DNA, 600 bp, Streptococcus pyogenes
atgtttagacttttaaagcgtgcctgcagttttcttcttctttttgtcatttatcaatcctttgttattcatcacaatgttcaacgtgttttggcatataagcctatggttgagaaaacattagcagaaaatgatacaaaggcaaatgtagacttagtcttagctatgatatacaccgagacaaaaggaggagaagcagatgtcatgcaatccagtgaaagcagttcaggacaaaaaaactcgattacagatagtcaggccagtattgagcacggggtgaatttactgtctcataatcttgctctagctgaggaagcaggagtagattcttggacggctgttcaggcctataattttggaacagcttatattgattatattgctgaacatggaggtcaaaataccgttgatttagcgactacctattccaaaaccgttgtggcgccaagcctaggcaacactagtggtcaaacctatttttattaccaccccctcgccttgatttctggaggtaagctttataagaatggcggcaatatctattactcacgagaagttcatttcaatctttatttaattgaactgatgagccttttttag

SEQ ID NO: 374 - protein, 199 aa, Streptococcus pyogenes
MFRLLKRACSFLLLFVIYQSFVIHHNVQRVLAYKPMVEKTLAENDTKANVDLVLAMIYTETKGGEADVMQSSESSSGQKNSITDSQASIEHGVNLLSHNLALAEEAGVDSWTAVQAYNFGTAYIDYIAEHGGQNTVDLATTYSKTVVAPSLGNTSGQTYFYYHPLALISGGKLYKNGGNIYYSREVHFNLYLIELMSLF

SEQ ID NO: 375 - DNA, 1284 bp, Streptococcus pyogenes
atgacacattcaacaaagcaggaacattctcactcgcaatcagctgtccttggcttacagcatgtgctttcgatgtatgccggatctattttagtaccaattatgatcgcaggtgctttaggttattccgctagagagttgacctacctgatttcgacagatattttcatgtgtggtgtggctactttcttacagttaaagttaaccaagcatacgggagtgggattaccagttgttttaggatgtgcttttcaatcagtggcacctctatccattattggagcgcaacaaggttcaggtgccatgtttggagccctcattgcgtcaggaatttatgtcattttagtggcaggtattttttctaagattgctcgtttcttcccaccaattgttacaggatcggtcattaccgttattggcttaagtctcgtaggtgttgctatggggaatatgggagataacgtcaaagagcctacggcacaaagcatgatgttatcattgttgacgattgtcattattcttttagtccaaaaatttaccaaaggttttgtgaaatccatttccattttgattgggcttgtagcgggaactttggtttcagctatgatgggattagtagatacaactcctgttgtagaggcttcttggattcatgtgccaaccccattttattttggcatgccaacttttgaaatcacttctattgtgatgatgtgtatcatcgcaacggtttctatggttgaatcaacaggtgtctacttagcgctttcagatttgactaatgatcaattagatgaaaaacgtttgcgcaatggttatcgctcagaagggatcgcagtctttctcggtgggttatttaacaccttcccttacactggtttttctcaaaacgttggacttgtccaaatctcaggtattaaaacccgtcgtccgatttactacgcagcaggtatccttgtggtcattggcctactccctaaatttagagcaatggcacaaatgattccaagcccagttcttggtggagccatgcttgttctctttggtatggttgctcttcaaggaatgcaaatgcttaatcgtgttgatttccaaaagaacgagtataattttattattgctgccgtttccatctcagcaggtttaggctttaatggcactaatctttttgccagcttaccagagacagctcaaatgttcttaacgaatggtattgtgattgccactttgacatctgttgtcttaaatttagttttaaatggcaaagacaaacaagatgaataa

SEQ ID NO: 376 - protein, 427 aa, Streptococcus pyogenes
MTHSTKQEHSHSQSAVLGLQHVLSMYAGSILVPIMIAGALGYSARELTYLISTDIFMCGVATFLQLKLTKHTGVGLPVVLGCAFQSVAPLSIIGAQQGSGAMFGALIASGIYVILVAGIFSKIARFFPPIVTGSVITVIGLSLVGVAMGNMGDNVKEPTAQSMMLSLLTIVIILLVQKFTKGFVKSISILIGLVAGTLVSAMMGLVDTTPVVEASWIHVPTPFYFGMPTFEITSIVMMCIIATVSMVESTGVYLALSDLTNDQLDEKRLRNGYRSEGIAVFLGGLFNTFPYTGFSQNVGLVQISGIKTRRPIYYAAGILVVIGLLPKFRAMAQMIPSPVLGGAMLVLFGMVALQGMQMLNRVDFQKNEYNFIIAAVSISAGLGFNGTNLFASLPETAQMFLTNGIVIATLTSVVLNLVLNGKDKQDE

SEQ ID NO: 377 - DNA, 1563 bp, Streptococcus pyogenes
atgcttttgtggtcaatttatttggaggtgatgagcatgcctagtttgtttgtaactttccaaaaccgttttaatgaatggctggcggctctgggggaacacctgcaaatttcccttttatctcttatgatcgccttgctaataggtgtgcctttagcagcccttctcagtcgcagcaaacgttggtcagacattatgttacaggtaacaggtgtttttcaaaccattccctcactggctttgcttggtcttttcatccctttaatgggaattggaacgttgcctgcagtgacagctttagttatctatgcgatttttccgattttacaaaacaccatcacaggattaaatggtattgacccaagtctcgtggaagcaggaatagcttttgggatgaccaaatgggagcgattgaaaacatttgagattccaattgccatgcctgttattatgtcaggtgtgcggacgtcagcagtcatgattatcggcacagctactttagcttccttgataggagccggtggacttggctctttcatcttattagggattgatcgtaataatgctaacctgattctgataggggctatttcttcagctctgctagctattattttcaatagtttgttacagtaccttgagaaagcttccttgcgacggattatgattagttttggaattaccttacttgcactgctagcatcgtatactcctatggcgcttagtcagttttcaaaaggaaaagatacagtggttattgccggtaaattgggagcagagcccgatattctgattaatctctataaggaattaattgaagaccaatcagatataagtgttgagttgaaatctaattttgggaaaactagcttcttatatgaagcccttaaatctggagatattgatatgtatcctgaatttacaggaaccataacatcaagtcttttacgcgacaaaccacctttgtctaatgaccctaagcaggtctatgaggatgctaaaaaaggcattgctaagcaagataaactgacccttctcaagccatttgcttaccaaaatacgtatgctgttgctatgccagaaaaattggctaaggaatatcagattgaaaccatttctgatttaaaagcgcatgctgatactttaaaggccggttttactttggaatttaaggacagagcagatggctataagggaatgcaatctcaatatggattacagctatctgtggcgacgatggagccagctcttcgttatcaagcaattcaatcaggagatatccaagtaacagatgcttactctacggatgctgaaattacgaaataccatttgaaagttttaaaggatgataaacagttgtttccaccttatcagggagctcctttgatgaaaacttccttattaacaaaacatccagaattaaaaggcattcttaatcaattagcgggaaaaattactgaaaaagagatgcaggacatgaactacgaggtatctgttaaaggagcagatgctaataaggtcgctcgagattatctgttgaaaacaggcttaatccagaaataa

SEQ ID NO: 378 - protein, 520 aa, Streptococcus pyogenes
MLLWSIYLEVMSMPSLFVTFQNRFNEWLAALGEHLQISLLSLMIALLIGVPLAALLSRSKRWSDIMLQVTGVFQTIPSLALLGLFIPLMGIGTLPAVTALVIYAIFPILQNTITGLNGIDPSLVEAGIAFGMTKWERLKTFEIPIAMPVIMSGVRTSAVMIIGTATLASLIGAGGLGSFILLGIDRNNANLILIGAISSALLAIIFNSLLQYLEKASLRRIMISFGITLLALLASYTPMALSQFSKGKDTVVIAGKLGAEPDILINLYKELIEDQSDISVELKSNFGKTSFLYEALKSGDIDMYPEFTGTITSSLLRDKPPLSNDPKQVYEDAKKGIAKQDKLTLLKPFAYQNTYAVAMPEKLAKEYQIETISDLKAHADTLKAGFTLEFKDRADGYKGMQSQYGLQLSVATMEPALRYQAIQSGDIQVTDAYSTDAEITKYHLKVLKDDKQLFPPYQGAPLMKTSLLTKHPELKGILNQLAGKITEKEMQDMNYEVSVKGADANKVARDYLLKTGLIQK

SEQ ID NO: 379 - DNA, 1149 bp, Streptococcus pyogenes
atgataattaaaggagttaccatgaaatttgaaaaaaaacaagtcttctatttagtccttacgtttatcttatgctatgggatcctagcaaactggcgaaatggaacggctatcgtcacgactatttacaaaacaagccttccttttttttatggagcagcaggtgcctatattgttaatattgtaatgagcgcttacgaaaaggtatatgtttatatctttaaagactggtcacatgtcttaaaagtaaaacggggtatttgtttactgttagcgtatttgacattttttattttaattacttggattatttccattgtcattccagacttaattacaagtattagtactctaacaaaatttgatactataacgatacaagaagttgttaacaatcttgagcacaataaactgttagcacgtactattcagtatattggtggcgatggcaaacttacagagacgattgctaactatagtcaacagttattaaagcaatttcttactgttttgacaaatattttaacatctgtcacggttattgcttctgcaattattaatctttttattagttttgttttttcgttatacgttttagcaagtaaagaagatctttgtcgtcagggaaatactttagtagatacttatactggtaagtacgctaaacgcattcattacttgttagagttgttgcatcagcgttttcacggattttttgttagtcagaccttagaagctatgattttaggttcgctgactgctagtggcatgtttatattaagattaccatttgcagggactattggcgttttagtagcttttacagcattgattccagttataggtgcttcaattggagcagctattggatttattttaattatgactcagtccatgtcacaggccattatttttatcatttttttaattattttgcagcagattgaaggcaattttatttatccgaaagtagttggtggatcgattggattaccggctatgtgggtattaatggcaattacaataggcgcttctttaaagggaatagttggtatgattattgcagttcctttagcagcgacactttatcaagtgattaaagataatattcaaaaaagacaagctattcaaaaaaaacaagtttcctaa

SEQ ID NO: 380 - protein, 382 aa, Streptococcus pyogenes
MIIKGVTMKFEKKQVFYLVLTFILCYGILANWRNGTAIVTTIYKTSLPFFYGAAGAYIVNIVMSAYEKVYVYIFKDWSHVLKVKRGICLLLAYLTFFILITWIISIVIPDLITSISTLTKFDTITIQEVVNNLEHNKLLARTIQYIGGDGKLTETIANYSQQLLKQFLTVLTNILTSVTVIASAIINLFISFVFSLYVLASKEDLCRQGNTLVDTYTGKYAKRIHYLLELLHQRFHGFFVSQTLEAMILGSLTASGMFILRLPFAGTIGVLVAFTALIPVIGASIGAAIGFILIMTQSMSQAIIFIIFLIILQQIEGNFIYPKVVGGSIGLPAMWVLMAITIGASLKGIVGMIIAVPLAATLYQVIKDNIQKRQAIQKKQVS

SEQ ID NO: 381 - DNA, 1074 bp, Streptococcus pyogenes
atgcgtaaactttattcctttctagcaggagttttgggtgttattgttattttaacaagtctttctttcatcttgcagaaaaaatcgggttctggtagtcaatcggataaattagttatttataactggggagattacattgatccagctttgctcaaaaaattcaccaaagaaacgggcattgaagtgcagtatgaaactttcgattccaatgaagccatgtacactaaaatcaagcagggcggaaccacttacgacattgctgttcctagtgattacaccattgataaaatgatcaaagaaaacctactcaataagcttgataagtcaaaattagttggcatggataatatcgggaaagaatttttagggaaaagctttgacccacaaaacgactattctttgccttatttctggggaaccgttgggattgtttataatgatcaattagttgataaggcgcctatgcactgggaagatctgtggcgtccagaatataaaaatagtattatgctgattgatggagcgcgtgaaatgctaggggttggtttaacaacttttggttatagtgtgaattctaaaaatctagagcagttgcaggcagccgagagaaaactgcagcagttgacgccgaatgttaaagccattgtagcagatgagatgaaaggctacatgattcaaggtgacgctgctattggaattaccttttctggtgaagccagtgagatgttagatagtaacgaacaccttcactacatcgtgccttcagaagggtctaacctttggtttgataatttggtactaccaaaaaccatgaaacacgaaaaagaagcttatgcttttttgaactttatcaatcgtcctgaaaatgctgcgcaaaatgctgcatatattggttatgcgacaccaaataaaaaagccaaggccttacttccagatgagataaaaaatgatcctgctttttatccaacagatgacattatcaaaaaattggaagtttatgacaatttagggtcaagatggttggggatttataatgatttatacctccaatttaaaatgtatcgcaaataa

SEQ ID NO: 382 - protein, 357 aa, Streptococcus pyogenes
MRKLYSFLAGVLGVIVILTSLSFILQKKSGSGSQSDKLVIYNWGDYIDPALLKKFTKETGIEVQYETFDSNEAMYTKIKQGGTTYDIAVPSDYTIDKMIKENLLNKLDKSKLVGMDNIGKEFLGKSFDPQNDYSLPYFWGTVGIVYNDQLVDKAPMHWEDLWRPEYKNSIMLIDGAREMLGVGLTTFGYSVNSKNLEQLQAAERKLQQLTPNVKAIVADEMKGYMIQGDAAIGITFSGEASEMLDSNEHLHYIVPSEGSNLWFDNLVLPKTMKHEKEAYAFLNFINRPENAAQNAAYIGYATPNKKAKALLPDEIKNDPAFYPTDDIIKKLEVYDNLGSRWLGIYNDLYLQFKMYRK

SEQ ID NO: 383 - DNA, 777 bp, Streptococcus pyogenes
atgaaaaaatttgccaatctttatttagcgagtgtctttgttttactctacattcctattttttatttgattttctattctttcaacaaaggtggggatatgaatggttttacaggatttacccttgagcattaccaaaccatgtttgaggatagtcgtctcatgacaatcttactgcaaacctttgttcttgcttttagtagcgctctactagcaacgattattgggatctttggagctatctttatccaccatgttagaggtaagtaccaaaatgccatgctatcagccaataatgtcttgatggtatcaccagatgtcatgattggggcttcctttttaattctttttacatcattgaagtttcagctgggcatgtcttcagttttattaagtcatattgctttttcgattcctattgtggttttgatggtattgccgcgcttgaaagagatgaatcaggacatggtcaacgccgcttatgatttgggagctaattatttccaaatgctcaaagaagtcatgctgccatactttacaccagggattattgcaggttattttatggcctttacctattccttagatgattttgcagtgactttctttttgactggaaatagtgttactacattatctgttgagatttattcgcgggctcgtcagggaatttccttggatatcaatgctttgtcaaccatcgttttctttttctccatcctcttagtgatcggttattattatatgtcacaggacaaggaggaaaaacatgcgtaa

SEQ ID NO: 384 - protein, 258 aa, Streptococcus pyogenes
MKKFANLYLASVFVLLYIPIFYLIFYSFNKGGDMNGFTGFTLEHYQTMFEDSRLMTILLQTFVLAFSSALLATIIGIFGAIFIHHVRGKYQNAMLSANNVLMVSPDVMIGASFLILFTSLKFQLGMSSVLLSHIAFSIPIVVLMVLPRLKEMNQDMVNAAYDLGANYFQMLKEVMLPYFTPGIIAGYFMAFTYSLDDFAVTFFLTGNSVTTLSVEIYSRARQGISLDINALSTIVFFFSILLVIGYYYMSQDKEEKHA

SEQ ID NO: 385 - DNA, 816 bp, Streptococcus pyogenes
atgccattgaggaggagcgtaatgaagaaaacctctagtcttttttcgattccttacttcttatggattctcttttttgttgtggcaccagtcactctcttgttttacaagtccttttttgacatagaagggcgcgtgaccttagccaattatgaaaccttttttagctcttggacttatttgaggatgagtgtgaattctattttatacgctggtattatcacactcgtcacgctcttgatttcatatcctacggctctctttttaacgcgcctaaagcacaagcagttgtggcttatgctcattatcttgccaacctgggtaaatttattgctaaaggcctatgcctttatgggaatctttggtcaacaaggagggattaacagctttttaacctttatggggattggcccgcagcaaatccttttcacagatttctccttcatttttgtagcctcttacattgagctcccttttatgatgttaccgatttttaacgctttggatgatattgaccataatgtcatcaatgccagtcgcgacctaggagctagtgaatttcaggccttctcaaaagttatttttcccctttctttaaatggggttagggcaggtgttcagtctgtctttatcccaagtttgagtctctttatgttaacccgtttgattggtggaaaccgggtgattacacttggtacagccattgaacaacattttttgaccacccaaaactggggaatgggatcaaccattggtgtcgtcttgattttgaccatggttgctattatgtggctcacaaaggagaaaagtaaatga

SEQ ID NO: 386 - protein, 271 aa, Streptococcus pyogenes
MPLRRSVMKKTSSLFSIPYFLWILFFVVAPVTLLFYKSFFDIEGRVTLANYETFFSSWTYLRMSVNSILYAGIITLVTLLISYPTALFLTRLKHKQLWLMLIILPTWVNLLLKAYAFMGIFGQQGGINSFLTFMGIGPQQILFTDFSFIFVASYIELPFMMLPIFNALDDIDHNVINASRDLGASEFQAFSKVIFPLSLNGVRAGVQSVFIPSLSLFMLTRLIGGNRVITLGTAIEQHFLTTQNWGMGSTIGVVLILTMVAIMWLTKEKSK

SEQ ID NO: 387 - DNA, 963 bp, Streptococcus pyogenes
atgaacaatagacataaacggcgccaaaaaagaaaagccttcactctcattaaccttatactattatttgcctgcattcttggtttgaccctcattttctatttatatcaagggtctaacaaattcggcttgtcagatgtctctcgatttgtacctaaaataagtctttttcatcacaaaaagacggcaaaaaaagaaacgacaaaacttaagaagactcatttcgattcctcaaaatctcaaaaaaaggcccattctaaattgacttggaccaagcaagaaacacctgtcaagatcccaattttaatgtatcatgctattcatgtaatgtcccctgaagagacggctaatgctaatttgattgtcaacccagatctctttgatcaacaacttcaaaaaatgaaagacgagggctactattttttgagtcctgaagaggtctaccgcgctctttcaaataatgaattgcctgctaaaaaagttgtatggctaacatttgatgacagtatgattgatttctacaatgttgcttacccaatcttaaaaaaatatgatgctaaagccaccaataatgttattacaggactaaccgaaatgggaagcgctgccaatctgactcttaagcagatgaaagaaatgaaacaagtcggtatgtctttccaagatcatacagtgaatcatcctgatctagagcaggctagtcctgatgttcaaacaactgaaatgaaagattcaaaggactatcttgataagcaattaaaccaaaacactattgccattgcttatccatctggtagatataatgacactaccttacaaattgcagctagacttaactataaattaggtgttaccactaacgaaggaatagctagcgcggctaatggacttctttctcttaaccggattcgtatcctcccaaacatgagtcctgaaaatcttttacaaacaatggaaccataa

SEQ ID NO: 388 - protein, 320 aa, Streptococcus pyogenes
MNNRHKRRQKRKAFTLINLILLFACILGLTLIFYLYQGSNKFGLSDVSRFVPKISLFHHKKTAKKETTKLKKTHFDSSKSQKKAHSKLTWTKQETPVKIPILMYHAIHVMSPEETANANLIVNPDLFDQQLQKMKDEGYYFLSPEEVYRALSNNELPAKKVVWLTFDDSMIDFYNVAYPILKKYDAKATNNVITGLTEMGSAANLTLKQMKEMKQVGMSFQDHTVNHPDLEQASPDVQTTEMKDSKDYLDKQLNQNTIAIAYPSGRYNDTTLQIAARLNYKLGVTTNEGIASAANGLLSLNRIRILPNMSPENLLQTMEP

SEQ ID NO: 389 - DNA, 1356 bp, Streptococcus pyogenes
gtgttattgttacagggtacttgctttatgagcttgtttaagctactaaaggtgtgtgccactatacttccttccaaatttctgagaatttttgttataatagtaactatgaaagatataatgataaaaaggtgggttatccttttttttatggtattaacttgttcagggtttggtaaaacagttctcgcagctgattttcaagtgggagcagaacatgcgattgtcgtagaggcagactctgggagagttctgtatgagaaagacgctaagacgccagatgctattgcctctttgaccaaattggtgacggcttatctggttttagataaggttaaatcaggccagctgcaattatcagatcaagttaatctctcagattatgccttcgagttaacaaaagataggtctttaagtaatgtaccttttgacaaaaaaacttattcagttcaagacctgttgacagctactttggtagcaagctcaaatagcgctgctattgcgttagccgaaaaagtggcgggctcagagcttcattttgtaaatcaaatgagagaacagctatctcattgggggattacttctggtaaaatcctcaacgcttcaggactgccgaatgaggtgctaaaggaccatcgttatcctggttctgcgttggaagaagagaatatgttgagtgctcaggatgttgccattgtgacgatgcatttactggaagattttcctgagattttagagatcactaaacaaacagaagttgattttgctggtaattctattaaaagttttaatcaactcttaccaggtatggctaagggtagagcaggagtggatgggctaaagacaggaacgacagatttggcaggtcattgccttgtggtaacttctattgaaaatggtatgaggctgattaccgttattctaaatgctgatggatctgataaaaaccaaaacacgcggtttgagcaagcaaatcgcttgttggactatgtggctagaacttattgtcgtcgtaagattcttaaaaaaggaagtcttgtctcggagcgatcgctccctattcaagatggccaagtaaaagaactaccgatatctgttgccgaagatgtaaccatcattttgcaacagggtgaacaagttcccaaacctaaacaatttatgatatcagagacttctttattagcaccgattactaaaggtgaagtggttgcttatttgacgtctccaagaataacagatcagtcagtgaggtatttaaaggaacctaagcgtattcctcttaaagctagccaatctctaaaaaaagcctctgacttacagctgtggtggcgagattttcttgaaaaaagacgttaa

SEQ ID NO: 390 - protein, 451 aa, Streptococcus pyogenes
MLLLQGTCFMSLFKLLKVCATILPSKFLRIFVIIVTMKDIMIKRWVILFFMVLTCSGFGKTVLAADFQVGAEHAIVVEADSGRVLYEKDAKTPDAIASLTKLVTAYLVLDKVKSGQLQLSDQVNLSDYAFELTKDRSLSNVPFDKKTYSVQDLLTATLVASSNSAAIALAEKVAGSELHFVNQMREQLSHWGITSGKILNASGLPNEVLKDHRYPGSALEEENMLSAQDVAIVTMHLLEDFPEILEITKQTEVDFAGNSIKSFNQLLPGMAKGRAGVDGLKTGTTDLAGHCLVVTSIENGMRLITVILNADGSDKNQNTRFEQANRLLDYVARTYCRRKILKKGSLVSERSLPIQDGQVKELPISVAEDVTIILQQGEQVPKPKQFMISETSLLAPITKGEVVAYLTSPRITDQSVRYLKEPKRIPLKASQSLKKASDLQLWWRDFLEKRR

SEQ ID NO: 391 - DNA, 747 bp, Streptococcus pyogenes
ttgttttgcttactatacactaaacgctcagcaatatatagaatgggagtaactaatatgttgaaaatacaaaatctaaaaaaatcttatggtaagagaaccatattgaataatgtcaatatgaatattcctaagggaaaagtgtatgctttaatcggtccaaatggtgctggaaaatcaactattatgaaaattttgacaggcttagttagtaagacaagtggttctattatttttgaaggtagagaatggtcacgtcgggatctgcgaaaaatcgggagtattattgaagaaccaccactttataaaaatttgagtgcttacgataatatgaaggtagttacaacaatgcttggtgtttcagaaagcactatacttccattattaaataaagttggtctaggaaatattgacaagagaccagtaaaacaattttctcttggaatgaagcaacggttaggtatagctatctctttaataaattcacctaaactacttatattagacgaacctactaatggcttggacccaattggaattcaagaattaagggaaattatagagtcatttaaatcagaaggaatgacaattatgatttcaagccatatactgtcagaagttgaacatctagctgattttattggatttatctatgaaggaaagattattctggaaaaagaatatgacggctctgagaatcttgaagagttattcaataatcaaattttatttgaaaagaggaggtag

SEQ ID NO: 392 - protein, 248 aa, Streptococcus pyogenes
MFCLLYTKRSAIYRMGVTNMLKIQNLKKSYGKRTILNNVNMNIPKGKVYALIGPNGAGKSTIMKILTGLVSKTSGSIIFEGREWSRRDLRKIGSIIEEPPLYKNLSAYDNMKVVTTMLGVSESTILPLLNKVGLGNIDKRPVKQFSLGMKQRLGIAISLINSPKLLILDEPTNGLDPIGIQELREIIESFKSEGMTIMISSHILSEVEHLADFIGFIYEGKIILEKEYDGSENLEELFNNQILFEKRR

SEQ ID NO: 393 - DNA, 1362 bp, Streptococcus pyogenes
ttggttataaatgggatgtttaaaaaatattcaataaaaaatcgtgtttggcgcgccgtcgttgaaattgtctttggagtttgtatcactgttttaatgattgcgataatatcgctttctttttcaaagttaaatatagtgacatctcataatgtgggagaagaattttatattaaagataaacagtcaatcaaacagttgaacaattatatgaagacattgggattagattatgttgtttttgatagaaaaacagataaagctatggaaggaaaatatttatctaaagaattttctttatttaacgaagttgcagaagaaaaaaataatctgacttttaattctgtacattatgatttatatactaatatcaattataatattgttataagatataatgagataccggagttctctaaccattaccttagaaatgtttcatataacatgttgacattttatattctgggaataggaacgagtatcagcattgtagttgctttaacacggtttgtaaaagaaatttctttgaatttcaaggaaatcaagaagttagcaaataaaatggggatagaagtcctttctgaaaatgaaaattattctaaaataatcgagtttgatgatatacttagaactttacatattaaaggtgataatttgaaaagtttgattgagcgagaaatattggaaaagcaagatctatcctttcaaattgcagcactttcgcatgatattaaaacacctttaacggttttaaaaggaaatcttgagttattagaattgactactttaaataaaaatcaggaaggttatattgtatctatgaacaatagtatttctgtttttgaaggctatttcaattctttaatatcttatacacgcatgctttcagaggatagatcagtgaaactaattttagttgaggagctattaagtgagttacattttgaagtcgatgacttattgaatatcaataatattgaattttctatttgtaatagacttattatcacttctttttatggagatgaggaaaatctgataagagctctttctaaccttttagttaatgcaataagatttatgcccgtattagataaaaaaatcgaagttatactgtctgagtcaggagagcaaattcattttgaaatatggaataatggtgagcgtttcagtgatagtacactgaaaaagggagataaattattttacacggaagattatagcagaggtaacaaacattatggaatcggtttggcatttgttaaaggcgttgctatcaaacacggtgggaatcttcaattgaataatccagctagaggaggtgctagcgccataatctcgataaaaaagaaaatttaa

SEQ ID NO: 394 - protein, 453 aa, Streptococcus pyogenes
MVINGMFKKYSIKNRVWRAVVEIVFGVCITVLMIAIISLSFSKLNIVTSHNVGEEFYIKDKQSIKQLNNYMKTLGLDYVVFDRKTDKAMEGKYLSKEFSLFNEVAEEKNNLTFNSVHYDLYTNINYNIVIRYNEIPEFSNHYLRNVSYNMLTFYILGIGTSISIVVALTRFVKEISLNFKEIKKLANKMGIEVLSENENYSKIIEFDDILRTLHIKGDNLKSLIEREILEKQDLSFQIAALSHDIKTPLTVLKGNLELLELTTLNKNQEGYIVSMNNSISVFEGYFNSLISYTRMLSEDRSVKLILVEELLSELHFEVDDLLNINNIEFSICNRLIITSFYGDEENLIRALSNLLVNAIRFMPVLDKKIEVILSESGEQIHFEIWNNGERFSDSTLKKGDKLFYTEDYSRGNKHYGIGLAFVKGVAIKHGGNLQLNNPARGGASAIISIKKKI

SEQ ID NO: 395 - DNA, 687 bp, Streptococcus pyogenes
atgtataagattttagccatagatgatgataaagaaattctgaagcttatgaagactgctttggagattgaaaattatcatgttataacctgtcaagagatagaattaccaatagtttttgatgattttaaaggatatgatttgatcttattggatatcatgatgcctaatataagtggaactgagttttgttataaaattcgggaagaagttcattctccaattatttttgttagcgctttagatggcgataatgaaattgtccaagctttaaatatagggggagacgattttattgtgaaaccatttagcttaaaacaattcgtagctaaagttaactctcatttgaagagagaagagagagcaaagataaagaatgaggctgaggagagagtgaagcgtagttttccacctatagaaatctatctagaggaacgtatgttatatattgataaacagccgttattcctgacttatagagagtacgaaattttagaattactgtcacgtcatccgtataaagttttcacaaaagaagagatatatgaacaagtatatagcgatgaagcttcagcattgtttcattctatttcagaatatatctatcagattagaatgaaattttcaagttttggaattaatccaataaaaactattcgcgggattggttataaatgggatgtttaa

SEQ ID NO: 396 - protein, 228 aa, Streptococcus pyogenes
MYKILAIDDDKEILKLMKTALEIENYHVITCQEIELPIVFDDFKGYDLILLDIMMPNISGTEFCYKIREEVHSPIIFVSALDGDNEIVQALNIGGDDFIVKPFSLKQFVAKVNSHLKREERAKIKNEAEERVKRSFPPIEIYLEERMLYIDKQPLFLTYREYEILELLSRHPYKVFTKEEIYEQVYSDEASALFHSISEYIYQIRMKFSSFGINPIKTIRGIGYKWDV

SEQ ID NO: 397 - DNA, 399 bp, Streptococcus pyogenes
ttgctatctgcttcttatttaagagtgattgttgctccagcttcttcaagtttagctttgatttcttcagcttctgcagcagcaacgccttctttaacgttagcaggtgctccatcaacaagacctttagcttctttaagaccaagacctgtgatttcacgaacagctttgataacgccaacttttttgtcgccagcagatgtcaattcaacgtcgaatgaatctttagcagcttcttcagcaccaccagcagctgcagcagctacaggagcagctgcagttacaccaaattcttcttcgatagcttttacaagatcgttaagctcaaggattgaagcttctttaatttcagcaataatgttttcaatgttcaatgccattgtgatttcctccaaataa

SEQ ID NO: 398 - protein, 132 aa, Streptococcus pyogenes
MLSASYLRVIVAPASSSLALISSASAAATPSLTLAGAPSTRPLASLRPRPVISRTALITPTFLSPADVNSTSNESLAASSAPPAAAAATGAAAVTPNSSSIAFTRSLSSRIEASLISAIMFSMFNAIVISSK

SEQ ID NO: 399 - DNA, 1650 bp, Streptococcus pyogenes
atgcgaggtgaacaggtggaagaacattttaaaaaacaattacaagatgatatttctagacatttttcgtaccaatcgttaatgttatcattgttgctaattggtctttttattattttttcattagcgccacaacaattaggcctctatcgtgatatcaatgccactgcaacccgttatcaccgtttgattagcaaacaagaagccttgctggatgacttagggaaaaatagcttactaccttttttaaataaaaacctcagcactgctgatttaagcaagcactattttcatttgcgccatagcagccaaacgtcaccagaacttttactattttcacctagtcaagaccttttatttgctagtaacccacatttaggaaatgtttttagtaaatctgtttatattcaagaagtcttgagagcaactcattctccaaaaaccttgtttaaagatgctatggatagtgaagatggtcactacttgatgatcattatgccaatgatagatcaaaaccaactaaagggatatgcttttttagtgatgagtggcaaagattttcttcatcctacaaaaacattgacgtcagagttggtcattgctgataagctggacaatacgtttacgttttccaatcgtgagtttatagcatctagtctagataagatcaatagccagtatttacaccattattttgtttttcaagataatcgagcctttatcacaagaaaggttgccttacaaggaggtctttggctttacatgtataggcccttgattccaatggtatcggtgatgttattttcacttatttcatcagctgttatctttgtgattttgcaacgtaaatcaagtggtttagctaaccgaattgcagctaaaaattcaagagcaatcaatcaaatggttagagatatgagtgcgatctctcggcaagaaaaaagacgtattgaccttgagagtcaagatgaatttcaatatttatctgatcaaatcaatcaaatggtagagcgattgcaacagttacatgataaaacgttagatttggaaactcaaaaattattatttgaaaaacggatgttagaagctcaattcaatccgcatttcctctacaatacgctagaaaccattttgattacgagccattatgattctgccctaacagaaaaaattgttatccaattgacaaaattgttgcggtatagtctcacggattctagcaaacctgtcttgctcaaagatgatttaagtgtcatcgagtcttatttagtgattaatcaggtgcggtttgaagaattgcaatatagcattaacctatccccagaccttgatagtcttgaagtgcctaaattgttcttgttacctttgatagaaaatgccatcaaatatggcttgaaagaacgacacgatgtcaagattaacattgcttgttattatcaagatgaccacattattttttctgtgagagataatggttcgggaattgatgctcatcaccaaaaagtgattcgagagcaattggaagctggagagtcacaccatgggttaattaactcttatcgtcggcttaagtatcatttttcagaagtatccttggtttttgatcaaggtgataaacagtttaatgttagttaccatgttaaggagtag

SEQ ID NO: 400 - protein, 549 aa, Streptococcus pyogenes
MRGEQVEEHFKKQLQDDISRHFSYQSLMLSLLLIGLFIIFSLAPQQLGLYRDINATATRYHRLISKQEALLDDLGKNSLLPFLNKNLSTADLSKHYFHLRHSSQTSPELLLFSPSQDLLFASNPHLGNVFSKSVYIQEVLRATHSPKTLFKDAMDSEDGHYLMIIMPMIDQNQLKGYAFLVMSGKDFLHPTKTLTSELVIADKLDNTFTFSNREFIASSLDKINSQYLHHYFVFQDNRAFITRKVALQGGLWLYMYRPLIPMVSVMLFSLISSAVIFVILQRKSSGLANRIAAKNSRAINQMVRDMSAISRQEKRRIDLESQDEFQYLSDQINQMVERLQQLHDKTLDLETQKLLFEKRMLEAQFNPHFLYNTLETILITSHYDSALTEKIVIQLTKLLRYSLTDSSKPVLLKDDLSVIESYLVINQVRFEELQYSINLSPDLDSLEVPKLFLLPLIENAIKYGLKERHDVKINIACYYQDDHIIFSVRDNGSGIDAHHQKVIREQLEAGESHHGLINSYRRLKYHFSEVSLVFDQGDKQFNVSYHVKE

SEQ ID NO: 401 - DNA, 1020 bp, Streptococcus pyogenes
atgtcaactcacttaagaaaacttccagggctgttactttgcttattgttagctcttccagcctggtgtttagggcgcttatttcccattattggagcacctgtttttgctattcttttaggaatgttgttagccttgttttatgaacatcgtgacaagactaaagagggaattagttttacatccaagtatattttacaaacagcagtggttttgcttggttttggattaaacctaacccaagttatggcagtgggcatgcagtctttaccgattatcatttcaactattgcgacagctcttttggtagcttatggcttacagaaatggctgcgcttagatgtcaatacagccaccttggtaggtgtaggatcttccatttgtggggggtctgctgttgcagcgacagctcctgtcattaaggcaaaggatgacgaggttgctaaggcaatttcagtcatttttctctttaatatgttagcagctttgctatttccaagtttaggacaattactaggcttatctaatgaaggttttgctatttttgccgggacagctgttaacgacacttcttccgtgactgcaacggccacggcctgggatgcccttcaccattccaatacactagatggagcaaccattgttaaattgactcgcaccttggctattctcccaattactttaggtttatccctttaccgagcgaaaaaagagcacgacatcgttacagaagaaaactttagccttaggaagtcattccctcgtttcatcctcttctttttattagcttctctcatcacaacattgatgaccagtttgggagtttctgccgatagtttccattacctaaaaaccttatcaaaattctttatcgtgatggctatggcagcgattggtttaaacacaaacctggttaaactgattaagacgggcggtcaggctatccttttaggagctatttgctgggtagctatcacccttgtcagtttagccatgcaattaagtttgggcatttggtaa

SEQ ID NO: 402 - protein, 339 aa, Streptococcus pyogenes
MSTHLRKLPGLLLCLLLALPAWCLGRLFPIIGAPVFAILLGMLLALFYEHRDKTKEGISFTSKYILQTAVVLLGFGLNLTQVMAVGMQSLPIIISTIATALLVAYGLQKWLRLDVNTATLVGVGSSICGGSAVAATAPVIKAKDDEVAKAISVIFLFNMLAALLFPSLGQLLGLSNEGFAIFAGTAVNDTSSVTATATAWDALHHSNTLDGATIVKLTRTLAILPITLGLSLYRAKKEHDIVTEENFSLRKSFPRFILFFLLASLITTLMTSLGVSADSFHYLKTLSKFFIVMAMAAIGLNTNLVKLIKTGGQAILLGAICWVAITLVSLAMQLSLGIW

SEQ ID NO: 403 - DNA, 645 bp, Streptococcus pyogenes
gtggaggttgtgatggtagaaaacactaaattactatgtagctgggtatggttattagcgttagctattctcataacgatctattcaacgtggctgtggtatcctcttgaggtggaccatctaaagttagaacaagttgtttttatgagcaaggatgctatcttgcataactataacggactactcaattacctcaccaatccttttgtgacaaggttggaatttgctaattttcactcatcggcagacggactcaagcattttgcagatgtgaagtggctttttcacctaactcaagtcgtttttcttggccttctttacccaacccttaagactttcacacaaaggttaaaaaccaaacgtttctggctccttcaaaaacctttaatactagcagctttgtttcctcttatgattggtctaatggctagtttcattgggtttgaacatttttttactctttttcatcaggtgctttttgtaggagatagcagctggctctttgatcccttgaaagattctgtgatttggatccttccagaagtctttttcttgcactgtttccttttctttatgatagtttacgaaatcatcctgtggagcttagtaggtttagcaagatggcagcgcctaaatgtagaatga

SEQ ID NO: 404 - protein, 214 aa, Streptococcus pyogenes
MEVVMVENTKLLCSWVWLLALAILITIYSTWLWYPLEVDHLKLEQVVFMSKDAILHNYNGLLNYLTNPFVTRLEFANFHSSADGLKHFADVKWLFHLTQVVFLGLLYPTLKTFTQRLKTKRFWLLQKPLILAALFPLMIGLMASFIGFEHFFTLFHQVLFVGDSSWLFDPLKDSVIWILPEVFFLHCFLFFMIVYEIILWSLVGLARWQRLNVE

SEQ ID NO: 405 - DNA, 957 bp, Streptococcus pyogenes
atgaaacgatttttaaatagtcgtccttggttaggaatggtatcagtcttttttgcgattctcctttttttaactgcagcatcgagcaatcataataactctaactcgcaaatttatagtccgattgaaacctatacgcatagccttaaagatgtaccaattgatatgaagtatgatagtgacaaatattttatcagtgggtattcttatggtgcggaagtttatctaacctccactaatcgtatcaaattagattctgaagtgaacaatgatacacgtaattttaagattgtggcggatctaacacatagtcatccaggtacagtaagtgtcaacctaagagtagaaaaccttccttctggggtgacagctaccgtatctccagataaaatatcagtcacaattggcaaaaaagaatctaaggtatttcctgttagaggaagcgttgatgctaaacaaattgcaaatggttatgaaattagcaaaattgaaacgggggttaataaggttgaagtgaccagtgatgaatctaccattgctttaattgatcacgttgtggcaaagttacctgatgatcaagtgttagataggaattatagtagtcgagtgaccttacaagctgtctcagctgatggaactattttagcaagtgcaattgatcctgcaaaaacaaatttatcagttgctgtaaaaaaaataacgaaatcagtcccgattagagttgaggcagtggggatgatggatgatagcttatcagatattcaatacaaattgtcaaaacaaacagctgttatctcaggtagtcgagaggtcttagaagatattgatgaaattattgcagaagttaacatttctgatgtcactaaaaatactagtaagaccgtgagtttgtcttctagtcaggtgtcaattgagccgtcagtagtgaccgttcagttgacaaccaccaaaaaataa

SEQ ID NO: 406 - protein, 318 aa, Streptococcus pyogenes
MKRFLNSRPWLGMVSVFFAILLFLTAASSNHNNSNSQIYSPIETYTHSLKDVPIDMKYDSDKYFISGYSYGAEVYLTSTNRIKLDSEVNNDTRNFKIVADLTHSHPGTVSVNLRVENLPSGVTATVSPDKISVTIGKKESKVFPVRGSVDAKQIANGYEISKIETGVNKVEVTSDESTIALIDHVVAKLPDDQVLDRNYSSRVTLQAVSADGTILASAIDPAKTNLSVAVKKITKSVPIRVEAVGMMDDSLSDIQYKLSKQTAVISGSREVLEDIDEIIAEVNISDVTKNTSKTVSLSSSQVSIEPSVVTVQLTTTKK

SEQ ID NO: 407 - DNA, 2487 bp, Streptococcus pyogenes
gtggtatatttttacttagtaaatcaatttacttttattatctcatttttatattggaggaatttatcagtgaatacttatttttgcacacaccataaacaattactactttattcaaacctattccttagctttgctatgatgggccaaggaactgccatttatgccgatacactgacttcaaattcagaacctaataatacttactttcaaacgcaaacgctcactactacagatagcgaaaaaaaggtagtacagccacaacaaaaagactactatactgaattgttagaccaatggaacagtattatcgcaggcaacgatgcttatgataaaaccaatcctgacatggtcacttttcataataaagctgaaaaggatgctcaaaacattattaaaagctatcaagggcctgaccacgaaaatagaacttacctttgggaacatgcaaaggattattccgcttctgctaatatcacgaaaacttaccgcaatattgaaaaaatagcaaaacagatcactaatcctgaatcatgctattatcaagatagtaaagctattgctattgtaaaagacggtatggccttcatgtatgaacacgcttataatctagatcgtgaaaatcatcaaacaactggaaaagaaaacaaagaaaattggtgggtttatgaaattggaactcctcgtgctattaataataccttatccttgatgtatccttattttactcaagaagaaattcttaaatacacagctccaatcgaaaaatttgtgcctgaccctactcgttttagggttcgcgctgccaatttttcaccttttgaagccaatagcggaaatttaattgatatggggcgtgttaaactcatttccggtattcttcgtaaagatgatctcgaaattagtgatacaatcaaagcaattgagaaagttttcacgctagttgatgaaggaaatggtttttaccaagacggttctttaattgatcacgtggttactaacgctcaaagtccactttataaaaaaggcattgcttacactggagcttacggtaatgtgcttatagatggcttatcgcaattaattcctattattcaaaaaacaaagtctcctataaaagcggataaaatggctactatctatcattggattaaccattcttttttccctatcatcgttcgtggagaaatgatggatatgactcgagggcgttctatcagtcgttttaatgcccaatctcatgttgctggcattgaagcacttcgtgctattttacgtattgctgacatgtctgaagagcctcaccgtttggcacttaaaacacgtataaaaacactcgtcacacaagggaatgctttttacaatgtctatgataatttgaaaacctatcacgatatcaaacttatgaaagaactactaagtgatacttctgttccagtccaaaaacttgatagttacgtagctagtttcaatagtatggataaattggcactatataataataaacacgattttgcttttggcctatcaatgttttcgaatcgaactcaaaattatgaagctatgaataatgaaaatcttcatggctggtttacttctgatggaatgttttacctatacaataacgatttaggacactacagtgaaaactattgggcaacggtaaatccctaccgcttacctggaaccacagaaactgagcaaaaaccactagagggaactcctgagaatattaaaacgaactatcaacaagttggcatgactggtctctctgatgacgcttttgttgcaagtaaaaaacttaataacacaagtgctctagctgctatgaccttcactaattggaataaaagcctcaccctcaataaagggtggtttatcttaggaaacaaaataatctttgttggtagcaatatcaaaaaccaatcatctcacaaggcgtatacaactattgaacaacgaaaagaaaatcaaaagtacccttactgttcttatgttaacaatcaacccgttgacttgaataatcagctagttgattttacaaacactaaaagtattttccttgaaagtgatgatcccgctcaaaatattggttactacttcttcaagccaacaacacttagcataagtaaggcacttcaaacagggaaatggcaaaacataaaagctgatgacaaatcaccagaagccatcaaagaagtttcaaatacctttatcactatcatgcaaaaccatactcaagatggcgatcgttatgcctatatgatgcttccaaatatgactcgtcaagaatttgaaacctatattagcaagcttgatatcgacttattagaaaacaatgacaaactggccgctgtctacgatcatgatagtcaacagatgcacgtcattcactatggaaaaaaagcaacgatgttttcaaatcataatctttctcatcaaggcttttatagttttcctcatcctgtcaggcaaaatcaacaataa

SEQ ID NO: 408 - protein, 828 aa, Streptococcus pyogenes
MVYFYLVNQFTFIISFLYWRNLSVNTYFCTHHKQLLLYSNLFLSFAMMGQGTAIYADTLTSNSEPNNTYFQTQTLTTTDSEKKVVQPQQKDYYTELLDQWNSIIAGNDAYDKTNPDMVTFHNKAEKDAQNIIKSYQGPDHENRTYLWEHAKDYSASANITKTYRNIEKIAKQITNPESCYYQDSKAIAIVKDGMAFMYEHAYNLDRENHQTTGKENKENWWVYEIGTPRAINNTLSLMYPYFTQEEILKYTAPIEKFVPDPTRFRVRAANFSPFEANSGNLIDMGRVKLISGILRKDDLEISDTIKAIEKVFTLVDEGNGFYQDGSLIDHVVTNAQSPLYKKGIAYTGAYGNVLIDGLSQLIPIIQKTKSPIKADKMATIYHWINHSFFPIIVRGEMMDMTRGRSISRFNAQSHVAGIEALRAILRIADMSEEPHRLALKTRIKTLVTQGNAFYNVYDNLKTYHDIKLMKELLSDTSVPVQKLDSYVASFNSMDKLALYNNKHDFAFGLSMFSNRTQNYEAMNNENLHGWFTSDGMFYLYNNDLGHYSENYWATVNPYRLPGTTETEQKPLEGTPENIKTNYQQVGMTGLSDDAFVASKKLNNTSALAAMTFTNWNKSLTLNKGWFILGNKIIFVGSNIKNQSSHKAYTTIEQRKENQKYPYCSYVNNQPVDLNNQLVDFTNTKSIFLESDDPAQNIGYYFFKPTTLSISKALQTGKWQNIKADDKSPEAIKEVSNTFITIMQNHTQDGDRYAYMMLPNMTRQEFETYISKLDIDLLENNDKLAAVYDHDSQQMHVIHYGKKATMFSNHNLSHQGFYSFPHPVRQNQQ

SEQ ID NO: 409 - DNA, 1512 bp, Streptococcus pyogenes
ttgctattgtctgcccatcctgtttttggaagggtacaaatcacccaagcagactttcaaaatcctcaggtacctaatacctttaccatgattatgcgtaaatacctccagggtgcagtcattgagcagttagaacagattgataatgaccgcattatcgaaatcaaggtatctaataaaaatgaaatcggagatgctattcaggcaaccctaatcattgaaatcatggggaagcacagtaatatcatcttggtggaccgtgcagaaaataaaatcatcgaatccattaaacatgttggtttttcacaaaactcttaccgcaccattttacctggctctacctacattgagcctcctaaaacagctgctgttaatccttttacaattacagatgtgcctctatttgaaatcctccaaacacaagaactaacagttaaaagcttgcaacagcattttcaaggtttggggcgagacaccgcaaaagagttggccgagcttctgaccacagacaaattaaaacggttccgtgagttttttgctagacctactcaggcaaatctgaccacagcttcttttgcgcctgttcttttctcagatagtcatgcgacgtttgagactttgtctgacatgcttgaccacttttatcaagacaaggctgagcgtgaccgtatcaatcagcaagccagtgatttgatccaccgtgtgcaaactgaactggacaaaaatcgcaacaagctaagtaagcaagaagctgagctgctagccactgaaaatgctgagttgttccgtcaaaaaggagaattattgaccacctacctcagtctggtcccaaacaaccaagactctgtgattttagacaattattatacaggggaaaaaattgagattgccttagacaaggctctgacaccaaatcaaaatgctcaacgttattttaaaaaataccaaaagctaaaagaagctgtcaaacacttatctggattgattgccgataccaagcaaagtattacttactttgagagcgtagactacaatttatctcaagcaagtatcgacgacatcgaagatattcgcgaagaattatatcaggctggctttttgaaaagtcgccaaagagacaaacgccataaacgtaaaaagcctgagcagtacctggcttcagatggaacaaccattctcatggtgggacgcaataacttgcaaaatgaagaactcacctttaaaatggctaaaaaaggagaactctggttccatgctaaggatatccctggaagtcatgtcatcatcaaagacaatcttgacccaagtgacgaggttaaaactgatgctgccgaactagctgcttattattcgaaagctaggttatcaaatctcgttcaggtcgatatgattgaagctaaaaaattacacaaacctagtggcgccaagccaggatttgtgacttatactggtcaaaaaactttacgggttactcctgaccaagccaaaattctctctatgaaattatcctga

SEQ ID NO: 410 - protein, 503 aa, Streptococcus pyogenes
MLLSAHPVFGRVQITQADFQNPQVPNTFTMIMRKYLQGAVIEQLEQIDNDRIIEIKVSNKNEIGDAIQATLIIEIMGKHSNIILVDRAENKIIESIKHVGFSQNSYRTILPGSTYIEPPKTAAVNPFTITDVPLFEILQTQELTVKSLQQHFQGLGRDTAKELAELLTTDKLKRFREFFARPTQANLTTASFAPVLFSDSHATFETLSDMLDHFYQDKAERDRINQQASDLIHRVQTELDKNRNKLSKQEAELLATENAELFRQKGELLTTYLSLVPNNQDSVILDNYYTGEKIEIALDKALTPNQNAQRYFKKYQKLKEAVKHLSGLIADTKQSITYFESVDYNLSQASIDDIEDIREELYQAGFLKSRQRDKRHKRKKPEQYLASDGTTILMVGRNNLQNEELTFKMAKKGELWFHAKDIPGSHVIIKDNLDPSDEVKTDAAELAAYYSKARLSNLVQVDMIEAKKLHKPSGAKPGFVTYTGQKTLRVTPDQAKILSMKLS

SEQ ID NO: 411 - DNA, 1182 bp, Streptococcus pyogenes
atgcccttaatacctgaaaagtctagaacagatagcttattttacaaatggtttttaaataatcaagctaccatggctttagtaataacacttttagcctttttaacgatttttgtttttactaaaatctcttttttatttatgccagtgatttctttttttgcggtcatcatgttgcccttggttatttcgaccattctgtattatctgaccaaacccttagttgaccttattaatcacttgggcccgaatcgtaccacctctatttttattgtttttggtttgattaccttactttttgtctgggcgatttcaggctttgttcccatggtacagacccaacttaccagttttattgaggatctgcccaaatacgtgggcaaggtcaatgaagaagccaataaacttcttgaaaatgaatggttagtcagctataagccccaactccaagacatgcttacccatacaagtcaaaaggctttggattacgcgcaaagtttttcaaaaaatgctattgactgggctggtaattttgctggtgccattgctcggattaccgtggctattattatttcgccctttattctcttttattttttacgagacagtagccacatgaaaaatggccttgtgaatgtcttacctctcaaattacgggtgcctatggttcgagtcttgggagatattaacaagcaattatcaggctatgtgcaagggcaggttacggttgcaattgttgtcggctttatgttttctatcatgtttagccttgtgggactgaaatatgccatcacttttgggattattgctggctttcttaacatgataccttacttaggaagtttccttgccatgatacctgttgtgattatggctatggtacaaggcccatttatgttggttaaggtgcttgttatctttatgattgagcaaaccatcgaagggcgttttgtagcaccgcttgttttgggaaataagctgagcattcatcctattaccattatgttcttgttattgactgcaggctctatgtttggtgtctggggtgttttccttgtcatcccaatctacgcttctgtcaaagttgtgattaaagaattatttgactggtacaaaaaagttagcggtttgtatgacgaagaagtattggtgattgaggaggttaaggaccatgttaaatag

SEQ ID NO: 412 - protein, 393 aa, Streptococcus pyogenes
MPLIPEKSRTDSLFYKWFLNNQATMALVITLLAFLTIFVFTKISFLFMPVISFFAVIMLPLVISTILYYLTKPLVDLINHLGPNRTTSIFIVFGLITLLFVWAISGFVPMVQTQLTSFIEDLPKYVGKVNEEANKLLENEWLVSYKPQLQDMLTHTSQKALDYAQSFSKNAIDWAGNFAGAIARITVAIIISPFILFYFLRDSSHMKNGLVNVLPLKLRVPMVRVLGDINKQLSGYVQGQVTVAIVVGFMFSIMFSLVGLKYAITFGIIAGFLNMIPYLGSFLAMIPVVIMAMVQGPFMLVKVLVIFMIEQTIEGRFVAPLVLGNKLSIHPITIMFLLLTAGSMFGVWGVFLVIPIYASVKVVIKELFDWYKKVSGLYDEEVLVIEEVKDHVK

SEQ ID NO: 413 - DNA, 711 bp, Streptococcus pyogenes
atgagatataattgtcgctactcacatattgataagaaaatctacagcatgattatatgtttgtcatttcttttatattccaatgttgttcaagcaaattcttataatacaaccaatagacataatctagaatcgctttataagcatgattctaacttgattgaagccgatagtataaaaaattctccagatattgtaacaagccatatgttgaaatatagtgtcaaggataaaaatttgtcagttttttttgagaaagattggatatcacaggaattcaaagataaagaagtagatatttatgctctatctgcacaagaggtttgtgaatgtccagggaaaaggtatgaagcgtttggtggaattacattaactaattcagaaaaaaaagaaattaaagttcctgtaaacgtgtgggataaaagtaaacaacagccgcctatgtttattacagtcaataaaccgaaagtaaccgctcaggaagtggatataaaagttagaaagttattgattaagaaatacgatatctataataaccgggaacaaaaatactctaaaggaactgttaccttagatttaaattcaggtaaagatattgtttttgatttgtattattttggcaatggagactttaatagcatgctaaaaatatattccaataacgagagaatagactcaactcaatttcatgtagatgtgtcaatcagctaa

SEQ ID NO: 414 - protein, 236 aa, Streptococcus pyogenes
MRYNCRYSHIDKKIYSMIICLSFLLYSNVVQANSYNTTNRHNLESLYKHDSNLIEADSIKNSPDIVTSHMLKYSVKDKNLSVFFEKDWISQEFKDKEVDIYALSAQEVCECPGKRYEAFGGITLTNSEKKEIKVPVNVWDKSKQQPPMFITVNKPKVTAQEVDIKVRKLLIKKYDIYNNREQKYSKGTVTLDLNSGKDIVFDLYYFGNGDFNSMLKIYSNNERIDSTQFHVDVSIS

SEQ ID NO: 415 - DNA, 780 bp, Streptococcus pyogenes
gtgagaaaaattgtaaatgttaattttaaaaagtttttaacttcatcttttctattgtgggtatttatatcagctataattccaacgtgttacgcgtatgagatgagtagtgtgggagttattaatttaaggaatttatactctacatatgatccaacagaagtaaaaggaaaaataaatgaaggtccgccattttcaggtagtttgttctacaaaaatattccttatggcaatagttcgattgaattaaaagtagaacttaatagcgtagaaaaagctaattttttttctggtaaaagggtggatatatttactttggagtattctcctccctgtaactctaatataaaaaagaattcatatggaggtattactttaagcgacggtaatagaattgataaaaaaaatatacctgttaatattttcatagacggcgttcaacaaaaatatagctatacagatataagtacagtgagtactgataagaaagaggttacgattcaggaacttgatgtgaaatcaagatattatcttcaaaaacattttaatatatacggattcggtgatgttaaagattttggccgctcctctagatttcaatctggctttgaggaaggaaatattatttttcatttgaatagtggagagagaatttcttataatctttttgatacaggacatggtgacagagagagtatgctaaaaaaatacagtgataataagaccgcttattctgatcaacttcatattgatatatacttagttaaatttaataaataa

SEQ ID NO: 416 - protein, 259 aa, Streptococcus pyogenes
MRKIVNVNFKKFLTSSFLLWVFISAIIPTCYAYEMSSVGVINLRNLYSTYDPTEVKGKINEGPPFSGSLFYKNIPYGNSSIELKVELNSVEKANFFSGKRVDIFTLEYSPPCNSNIKKNSYGGITLSDGNRIDKKNIPVNIFIDGVQQKYSYTDISTVSTDKKEVTIQELDVKSRYYLQKHFNIYGFGDVKDFGRSSRFQSGFEEGNIIFHLNSGERISYNLFDTGHGDRESMLKKYSDNKTAYSDQLHIDIYLVKFNK

SEQ ID NO: 417 - DNA, 333 bp, Streptococcus pyogenes
ttgataaaattagcgtctaaaccaacaatactgctagctttgagattaatcacattgattttgtttgcatcgattgtcccaccgataatctggtcggctcttagcttgataaactcccctaacttagccccaaaagctccattaaccgtcgtattgccatcaagagcgatgtttttaccagctatttgcacaccgcgggaattcaagttaatcgctgagataatatcgctgccagacattttactttgcgggattttgtctttaatcgcaagcatgatactgtcgccagattgccgcaagagggactgtatttttcctaaggtcacagactga

SEQ ID NO: 418 - protein, 110 aa, Streptococcus pyogenes
MIKLASKPTILLALRLITLILFASIVPPIIWSALSLINSPNLAPKAPLTVVLPSRAMFLPAICTPREFKLIAEIISLPDILLCGILSLIASMILSPDCRKRDCIFPKVTD

SEQ ID NO: 419 - DNA, 270 bp, Streptococcus pyogenes
gtgaataaacgaatcaagaaaaaacataaattggaaacagcagttgtgttgcttatcgcagaaaatgctatgcaggctgaagctattaagaatcaaaacagacaaattgcagagctgagatcgattatacaacaaaacgcccaagcaataaatagagagtttgcagcagttaaaggtgtgtgtcttgataatcaagcagctattacaaacattgcagttgatattaactacgtcaagaaaaactacaaacggaagtgggggaagaaatag

SEQ ID NO: 420 - protein, 89 aa, Streptococcus pyogenes
MNKRIKKKHKLETAVVLLIAENAMQAEAIKNQNRQIAELRSIIQQNAQAINREFAAVKGVCLDNQAAITNIAVDINYVKKNYKRKWGKK

SEQ ID NO: 421 - DNA, 870 bp, Streptococcus pyogenes
atgaaaggtattattcttgcaggaggttcagggacacgcttgtatccactgacccgtgccgcatctaaacagttgatgcccatttatgacaaaccaatgatttattacccattgtcaaccttgatgttggcagggattaaagatgttttaatcatttcaactccccaagatcttcctcgtttcgaagaattgctaggagacgggtcagaatttggcattagcttatcctataaggaacaaccaagcccagatggtttagcacaagctttcattattggagaggagtttatcggtgatgaccgtgttgctcttattttaggagataatatttaccacggtaatggcctcactaaaatgcttcaaaaggcagctgccaaagaaaaaggagccaccgtttttggttatcaagtgaaagaccctgagcgctttggagtggtggaatttgatgagaacatgaatgctatctctatcgaagaaaaaccagaagtgcctaagtctcactttgcagtgactggactttatttctatgacaatgacgtggtagagattgctaaaaacattaaaccaagcgcgcgtggtgagttggaaattacagacgtcaacaaggcttacttggaacgtggtgacctctccgttgaattgatggggcgtggttttgcatggttagacactggaacgcatgaaagtctacttgaagcggctcaatatattgaaactgttcaacgcttgcaaaacgctcaagtggcaaatctggaagaaattgcctatcgcatgggctatatcagtaaagaagatgtccataaattggcgcaatctttaaagaaaaacgaatacgggcaatacttgcttcgtttgattggagaagcttaa

SEQ ID NO: 422 - protein, 289 aa, Streptococcus pyogenes
MKGIILAGGSGTRLYPLTRAASKQLMPIYDKPMIYYPLSTLMLAGIKDVLIISTPQDLPRFEELLGDGSEFGISLSYKEQPSPDGLAQAFIIGEEFIGDDRVALILGDNIYHGNGLTKMLQKAAAKEKGATVFGYQVKDPERFGVVEFDENMNAISIEEKPEVPKSHFAVTGLYFYDNDVVEIAKNIKPSARGELEITDVNKAYLERGDLSVELMGRGFAWLDTGTHESLLEAAQYIETVQRLQNAQVANLEEIAYRMGYISKEDVHKLAQSLKKNEYGQYLLRLIGEA

SEQ ID NO: 423 - DNA, 900 bp, Streptococcus pyogenes
atgacaaaaataaaaatagttgtgattgttggtccgacagcggttggaaaaacagcacttgggattagtttagccaaggcttttaatggagaaattatttcaggagatagccagcaagtttatcgacagttggatattggaacagccaaggccactcaagaagagcaagaagcagcggttcatcacttaattgatattcgtgaggtgacggagtcttattcggcctacgattttgttcaagatgctcaaaaatctatttcagatattgttagtcgtgggaaattaccaattattgtaggtggaactggtctttacttacaaagtttactcgaaggttatcatctaggaggtcaagttgatcaagaggcggtaaaagcctatcggaatgagttggagcaattggacgatcacgacttgtatgaacgcttgcaagtcaataacattaccattgagcaggtgaatcgcagacgggcgatccgagcccttgaattggctcagtttgctgatgaattagagaatgccgagacggcttatgagccgcttattatcggcttgaatgatgaccgccaagtcatctatgaccgtatcaatcagcgcgtgaatcgtatgattgaaaacggcttattggaagaagcaaaatggttatatgagcattacccgactgttcaggctagtcgtggcataggttataaggaattattcccctattttgtaggtgaaatgactttggcagaagctagtgatcaattaaaacaaaacacgagacgttttgccaagcgacagctaacttggttccgcaatcgaatggctgttagcttcactgccataacggctcctgattacccacaggtagtacatgatagggtcagggattttcttggtcagaaagagaagtcatga

SEQ ID NO: 424 - protein, 299 aa, Streptococcus pyogenes
MTKIKIVVIVGPTAVGKTALGISLAKAFNGEIISGDSQQVYRQLDIGTAKATQEEQEAAVHHLIDIREVTESYSAYDFVQDAQKSISDIVSRGKLPIIVGGTGLYLQSLLEGYHLGGQVDQEAVKAYRNELEQLDDHDLYERLQVNNITIEQVNRRRAIRALELAQFADELENAETAYEPLIIGLNDDRQVIYDRINQRVNRMIENGLLEEAKWLYEHYPTVQASRGIGYKELFPYFVGEMTLAEASDQLKQNTRRFAKRQLTWFRNRMAVSFTAITAPDYPQVVHDRVRDFLGQKEKS

SEQ ID NO: 425 - DNA, 723 bp, Streptococcus pyogenes
ttgcaaaataatttgctaattttttccgaattcttttccagatctagttctccaatctatgaatatgttataataaggattatgaaattactactttttattaccattgcctatttacttggttctattccaactggactatggattggacagtacttttaccacatcaacttacgagagcatggatcaggaaatactggaaccacaaatacttttcggattttaggtgtcaaggcaggaacagctaccttagctattgatatgtttaaagggacactttcaatattgttaccaattatttttggtatgacttcaatttcatccattgctatcggctttttcgcagttttagggcatacttttcctatttttgccaactttaaaggtggtaaggccgtagcaacaagtgctggtgtattgctaggctttgctccgttatatctcttttttttagcatctatctttgttttagttctctatttatttagtatgatatctttagctagtgtggtttcagctatcgttggtgtgttatctgttttaacatttcctgccattcattttcttttaccaaattatgactactttttaacttttattgtgatattacttgcgttcattattattataagacacaaagataacattagtcgtatcaaacatcatactgaaaatctaataccttgggggctaaatttaagcaaacaagtgcctaaaaaataa

SEQ ID NO: 426 - protein, 240 aa, Streptococcus pyogenes
MQNNLLIFSEFFSRSSSPIYEYVIIRIMKLLLFITIAYLLGSIPTGLWIGQYFYHINLREHGSGNTGTTNTFRILGVKAGTATLAIDMFKGTLSILLPIIFGMTSISSIAIGFFAVLGHTFPIFANFKGGKAVATSAGVLLGFAPLYLFFLASIFVLVLYLFSMISLASVVSAIVGVLSVLTFPAIHFLLPNYDYFLTFIVILLAFIIIIRHKDNISRIKHHTENLIPWGLNLSKQVPKK

SEQ ID NO: 427 - DNA, 651 bp, Streptococcus pyogenes
atgattaatatcccattaatgaaagatagtttaggatttgtgttatcgggattaccttatacccttggtatttcgttgctcagtttttttacgggtctgtttttaggtttaggcctagcccttctgggaaggtcacgtcagccgttgattcattatcttgttagagcgtacatctctattatgcgaggtgtgccgatgatcgtggtgctctttgttctttatttcgggttgccttattatggtttagaattgccagctttactttgcgcttatcttggtttttctatggttagcgctgcctatatttctgaagtttttcgctcttctatagaagctattgacaagggacaatgggaagcagctaaggctttagggttgccatatgctcttatggttaagaaaattattcttcctcaagcctttcgaattgcagttcctcctttaggaaatgtcattattgatatggttaaaagttcgtcgctagctgccatgattaccgtaccagatatttttcaaaatgccaaaattattggcggtagagagtgggattacatgtccatgtatattttagtagcctttatctattggcttattgcttttttgttagaacgttaccaagaattcttagaaaataagctagcacttgtttaa

SEQ ID NO: 428 - protein, 216 aa, Streptococcus pyogenes
MINIPLMKDSLGFVLSGLPYTLGISLLSFFTGLFLGLGLALLGRSRQPLIHYLVRAYISIMRGVPMIVVLFVLYFGLPYYGLELPALLCAYLGFSMVSAAYISEVFRSSIEAIDKGQWEAAKALGLPYALMVKKIILPQAFRIAVPPLGNVIIDMVKSSSLAAMITVPDIFQNAKIIGGREWDYMSMYILVAFIYWLIAFLLERYQEFLENKLALV

SEQ ID NO: 429 - DNA, 1260 bp, Streptococcus pyogenes
ttgtttattagaaaaataggaggtgacatgtttaatcgtatccgcattcgttttatcatgattgcttctattgccatttttattattttaagttcaattgttggtattattaacacggcacgctgttaccaaagtcaacaagaaattaaccgtattttacatttaatttcctcaaataaaggtaaattacctggcactacggaaagctctaaacgacttggaacgaaactgtctgaagatagcctaagccagtttcggtattatagtgtcatttttaatgctaatggacatctactttcttctaatactgctaatatttcagctttagatagagaagaagcccaatattttgctagactttttgctaagtctggggaagaaaaaggcagttaccgtcaccaagatagtgtttattcgtacttgattactcagctgccaaatgaagaaaaactggttgtaattttagatactaccttttattttcgtagtgtaggagatttattagctgtttcagtgatgttggcctttggaggatttatcttttttgttgttttagtgagtcttttttccggtatggtcatcaaaccttttgtccaaaattatgagaagcagcgtcgctttattactaatgcaggccacgagttaaaaacaccactagccattatctcagccaataatgaattggtcgaattaatgactggagaatcagaatggaccaagagtacaagtgatcaggtgaagcgattgacaggcttgattaatcaaatgattactttggctcgtttggaggaacagccagatgtggtattacatatggtagacttttcagctattgctcaagatgcagctgaagattttaagagtctggttttgaaagatggtaaacgttttgatttgacgattcaaccgaatattatgattaaagcggaggaaaagtcattgtttgaacttgtgacaattttagttgataatgccaataaatattgtgatcctaaaggcttggtcaaggtatctttaaccactattggaagaagacgaaaacgagcgaaattagaagtttctaatacctatttggaaggaaaatccattgattacagccgcttctttgaacgcttttatcgcgaagacgaatcccataatagcaaagaaaaaggttatggaattggtttatctatggcagaaagtatggttaagttatttaaaggaacgataactgtaaattataaaaacgatgctattgtttttacagtggtgatttga

SEQ ID NO: 430 - protein, 419 aa, Streptococcus pyogenes
MFIRKIGGDMFNRIRIRFIMIASIAIFIILSSIVGIINTARCYQSQQEINRILHLISSNKGKLPGTTESSKRLGTKLSEDSLSQFRYYSVIFNANGHLLSSNTANISALDREEAQYFARLFAKSGEEKGSYRHQDSVYSYLITQLPNEEKLVVILDTTFYFRSVGDLLAVSVMLAFGGFIFFVVLVSLFSGMVIKPFVQNYEKQRRFITNAGHELKTPLAIISANNELVELMTGESEWTKSTSDQVKRLTGLINQMITLARLEEQPDVVLHMVDFSAIAQDAAEDFKSLVLKDGKRFDLTIQPNIMIKAEEKSLFELVTILVDNANKYCDPKGLVKVSLTTIGRRRKRAKLEVSNTYLEGKSIDYSRFFERFYREDESHNSKEKGYGIGLSMAESMVKLFKGTITVNYKNDAIVFTVVI

SEQ ID NO: 431 - DNA, 1020 bp, Streptococcus pyogenes
atgagaaaaagatgctattcaacttcagctgcagtattggcagcagtgactttatttgttctatcggtagatcgtggtgttatagcagatagtttttctgctaatcaagagattagatattcggaagtaacaccttatcacgttacttccgtttggaccaaaggagttactcctccagcaaacttcactcaaggtgaagatgtttttcacgctccttatgttgctaaccaaggatggtatgatattaccaaaacattcaatggaaaagacgatcttctttgcggggctgccacagcagggaatatgcttcactggtggttcgatcaaaacaaagaccaaattaaacgttatttggaagagcatccagaaaagcaaaaaataaacttcaatggcgaacagatgtttgacgtaaaagaagctatcgacactaaaaaccaccagctagatagtaaattatttgaatattttaaagaaaaagctttcccttatctatctactaaacacctaggagttttccctgatcatgtaattgatatgttcattaacggctaccgccttagtctaactaaccacggtccaacgccagtaaaagaaggtagtaaagatccccgaggtggtatttttgacgccgtatttacaagaggtgatcaaagtaagctattgacaagtcgtcatgattttaaagaaaaaaatctcaaagaaatcagtgatctcattaagaaagagttaaccgaaggcaaggctctaggcctatcacacacctacgctaacgtacgcatcaaccatgttataaacctgtggggagctgactttgattctaacgggaaccttaaagctatttatgtaacagactctgatagtaatgcatctattggtatgaagaaatactttgttggtgttaattccgctggaaaagtagctatttctgctaaagaaataaaagaagataatattggtgctcaagtactagggttatttacactttcaacagggcaagatagttggaatcagaccaattaa

SEQ ID NO: 432 - protein, 339 aa, Streptococcus pyogenes
MRKRCYSTSAAVLAAVTLFVLSVDRGVIADSFSANQEIRYSEVTPYHVTSVWTKGVTPPANFTQGEDVFHAPYVANQGWYDITKTFNGKDDLLCGAATAGNMLHWWFDQNKDQIKRYLEEHPEKQKINFNGEQMFDVKEAIDTKNHQLDSKLFEYFKEKAFPYLSTKHLGVFPDHVIDMFINGYRLSLTNHGPTPVKEGSKDPRGGIFDAVFTRGDQSKLLTSRHDFKEKNLKEISDLIKKELTEGKALGLSHTYANVRINHVINLWGADFDSNGNLKAIYVTDSDSNASIGMKKYFVGVNSAGKVAISAKEIKEDNIGAQVLGLFTLSTGQDSWNQTN

SEQ ID NO: 433 - DNA, 600 bp, Streptococcus pyogenes
ttgaaggtgaaaaaaaggagaagaagggctaaatcatcagtaaatcgacttgtcttagggttagtattacttaatctgattgttagtatgtggacactaaaattgggaaaccagcgattagctccgtatgcggatcacgaaactctgacatttgtcaggaagattagtcatgctgctcaatcagtcgctcaaaagaaacagttatatagttcggtgatgatggctcaggccattttagaatccaataatggtaagtcacaactaagtcaaaaaccttattataattttttcgggattaaggggagctataaagaacggtcagtcatttttccaactttagaagacgatggacaagggaatctttatcaaattgatgctgcttttcgttcctatgggagcctgacagcttgttttttagattacgcaagagttttgaatgatccactttatgacaaaacccacaaaaagttttggtctcattatcaagatgctactgcaaccttaacaggcacttacgccactgatacaacttaccataccaaattaaatgaattgattgaatggtatcaactcactaattttgatggtctaatgaaatag

SEQ ID NO: 434 - protein, 199 aa, Streptococcus pyogenes
MKVKKRRRRAKSSVNRLVLGLVLLNLIVSMWTLKLGNQRLAPYADHETLTFVRKISHAAQSVAQKKQLYSSVMMAQAILESNNGKSQLSQKPYYNFFGIKGSYKERSVIFPTLEDDGQGNLYQIDAAFRSYGSLTACFLDYARVLNDPLYDKTHKKFWSHYQDATATLTGTYATDTTYHTKLNELIEWYQLTNFDGLMK

SEQ ID NO: 435 - DNA, 1947 bp, Streptococcus pyogenes
atgaaaattcaagatttattgagaaaagatattatgattctcgatttacaggctatttctaaagaagttgccattgacgagatgattactaaattagttgaaaaagatattgtacatgattttgatgtctttaaaaagagtatcatgacacgtgaagaacaaacatcaacagggcttggtgatgggattgccatgcctcattctaaaaatattgtagtagataaaccagcggtcttgtttgcgaaatcaaataaaggtgtggattacaaggctttagatggtcaaccaacggatctcttctttatgattgctgcgcctcaaggagcaaatgatactcacttggctgcactagcagaattatcacaataccttttgaaagacggctttgctgataaacttcgtgctgcagcgacaccagaagcagtcattgctgtttttgatgaagcgtcaacagctaaagaagaagtggttgctccaacaagtggtcaagactttatcgttgctgttacagcttgtccgacaggaattgctcacacttatatggcagaagaggctttgaaaaaacaagctgcagaaatgggagtagctattaaagttgaaacaaacggtgcttctggtgtggctaatcgtttaaccgctgaagatattcagagagctaaaggagttattgttgcagctgataaagcggttgaaatggaccgttttgatggtaaacaattcattgctcgccctgttgcagatggtatcaagaaaagtcaggaattgatttctttgattttaaacaatgaaggaaacacttatcatgctaaaaatggaaaatctgaaacagcagtatcaactgagaaaacaagtttaggcggtgctttctataaacacttgatgggcggtgtctcacaaatgttgccatttgttattggtggcgggattatgattgctctagcatttttattggataacatgcttggtgtgccaaatgatcagcttggaagtcttggatcctatcatgaaatagcagctatttttatgaacattggtggagcagccttttccttcatgttaccagtactagcaggttatatcgcttattctattgctgaaaaaccgggcttagtagctggttttgtggcaggtgccattgcctcaaatggtcttgcttttggtaaggtaccatttgcagcaggaggagaagtgagcttgggcttaacgggcgtgccatcaggtttccttggggcgcttgtgggtggtttccttgccggtggtgttattcttgcccttcgtaaattgttggcaggcctaccacgttctctagaaggggttaaatctatcctcctttacccattacttggcgtccttgtcactggtttcttgatgctttttgtcaatattccaatggcagctattaacacagcccttaatgatttcttacaaggtctttcaggaagctctgctgtccttatgggacttcttgttggtggaatgatggctgttgacatgggtggtcctgttaataaggcagcttatgtttttggtacaggaactttagcagctactgtggcaaatggtggttcggtcgttatggccgctgttatggcaggtggtatggtacctcctcttgctgtttttgtagccactctcttgtttaaagataaatttaccaaagaagaacgtgaatcaggcttgacaaatattgttatgggactttcattcatcaccgaaggagcaattccgtttggtgcagctgacccagcacgtgcgattcctagctttatcgcaggttctgccttgacaggagctcttgttggtttggctggtattaaattaatggcgccacatggtggtatcttcgtaatcgctttaacaagcaatccaatcttatatcttgtctttgttgtgattggtgcccttgtatcaggtatcttatttggcgctcttcgcaaaaaagcctaa

SEQ ID NO: 436 - protein, 648 aa, Streptococcus pyogenes
MKIQDLLRKDIMILDLQAISKEVAIDEMITKLVEKDIVHDFDVFKKSIMTREEQTSTGLGDGIAMPHSKNIVVDKPAVLFAKSNKGVDYKALDGQPTDLFFMIAAPQGANDTHLAALAELSQYLLKDGFADKLRAAATPEAVIAVFDEASTAKEEVVAPTSGQDFIVAVTACPTGIAHTYMAEEALKKQAAEMGVAIKVETNGASGVANRLTAEDIQRAKGVIVAADKAVEMDRFDGKQFIARPVADGIKKSQELISLILNNEGNTYHAKNGKSETAVSTEKTSLGGAFYKHLMGGVSQMLPFVIGGGIMIALAFLLDNMLGVPNDQLGSLGSYHEIAAIFMNIGGAAFSFMLPVLAGYIAYSIAEKPGLVAGFVAGAIASNGLAFGKVPFAAGGEVSLGLTGVPSGFLGALVGGFLAGGVILALRKLLAGLPRSLEGVKSILLYPLLGVLVTGFLMLFVNIPMAAINTALNDFLQGLSGSSAVLMGLLVGGMMAVDMGGPVNKAAYVFGTGTLAATVANGGSVVMAAVMAGGMVPPLAVFVATLLFKDKFTKEERESGLTNIVMGLSFITEGAIPFGAADPARAIPSFIAGSALTGALVGLAGIKLMAPHGGIFVIALTSNPILYLVFVVIGALVSGILFGALRKKA

SEQ ID NO: 437 - DNA, 1059 bp, Streptococcus pyogenes
atgacaacaacagataaagagacatttagttcttttatgaataaggtcttggctggtacagcgattgctatcgttgtggcactcattccaaatgctattttagcgactttcttaaaaccgcttttgccaaatatggcagctgctgaatttttacacattgtgcaagtcttccaattcttcacgccgattatggctggtttcttgattgggcaacaatttaagtttaatcctatgcaacagttggctgttggtggagctgcttatatcggttctggagcctgggcttatacagaagtcattcaaaaaggtgtggcgacaggaacattccaacttagaggtattggggacttaatcaatatgatgattacagctagccttgcggttttagctgtgaaatattttgggaataaatttggctctttaaccattatcttgttacctatcactataggaactggcgtaggttatattggttggaaatttttgccttatgtgtcttacgtgacaaccctgatcggacaagggattaattcttttacaaccttacaacctattttaatgtctattttaattgcagttgctttctcgcttatcattgttagtccgatttcaactgttgcaatcggtttagctattgggcttaatggaatggctgcgggagcagcttctatgggaattgcatcgacagcagcagtcttagtgtgggcgacgcttaaagttaataaatctggtgtaccaattgctatcgcacttggggctatgaaaatgatgatgccaaacttcttgaaacatcctatcatggctattccgatggtgttcactgcagcaattagctcattaacagtaccattgtttaatcttgttggaacaccagcttcatctggttttggcttagttggtgcagtaggtccgattgcttctttagcaggtggtagctcaatacttattattatccttgcttggatcattgttccgtttgcggttgcttttgcggcgcataaggtttctaaagatattctaaaactgtataaagaagacattttcgtctttgaaggctaa

SEQ ID NO: 438 - protein, 352 aa, Streptococcus pyogenes
MTTTDKETFSSFMNKVLAGTAIAIVVALIPNAILATFLKPLLPNMAAAEFLHIVQVFQFFTPIMAGFLIGQQFKFNPMQQLAVGGAAYIGSGAWAYTEVIQKGVATGTFQLRGIGDLINMMITASLAVLAVKYFGNKFGSLTIILLPITIGTGVGYIGWKFLPYVSYVTTLIGQGINSFTTLQPILMSILIAVAFSLIIVSPISTVAIGLAIGLNGMAAGAASMGIASTAAVLVWATLKVNKSGVPIAIALGAMKMMMPNFLKHPIMAIPMVFTAAISSLTVPLFNLVGTPASSGFGLVGAVGPIASLAGGSSILIIILAWIIVPFAVAFAAHKVSKDILKLYKEDIFVFEG

SEQ ID NO: 439 - DNA, 876 bp, Streptococcus pyogenes
atgccagcaagtaaaaaagtcaccattatttttatattaaatcttagtttttccctcattgaatttatttttgggacattattcttttcgggtgctattttagcagatgctgtccacgattttggagatgccattgctattggtatctcagctatcttagaaagaaaggctgttaaaaaagagagtccaaatttttcactaggctataagcgatttagccttttaggagcgctaacgacaaatctaatacttattagcgggtcattattagtaatgattgaaacgataccaaaattatggcatcctactattgttaattatgacggtatgttcgttttagctatttttgcaattataatcaatggatttgctagcttcatcattcactctaaccagacaaaaaatgaagaaatattaagccttcactttttagaagatatccttgggtggttagccattatcatactgtcactgatcttaaaatggaaaccttggtacattcttgatcctttattatcaattgccattgcttcttttatattatctaaagctcttccaaagttagtagcaactgctaacatttttttagatggtgttcctgattctatagactattgcactttgcaccatgaactcagccaacttcctcatatagtgtctgttaatcagcttaatgtttggtcgatggatggtattgatcatagagcaactatacattgctgcttgagagaatctaccactgaaaaacattgcaaaaaatctattagactgatttgtcaaaggtacaatataaactcagtcactgtggaaatcgatacttctttaaacgaacaccaacatcactgttcttctctttctagtattgaagtcaactaa

SEQ ID NO: 440 - protein, 291 aa, Streptococcus pyogenes
MPASKKVTIIFILNLSFSLIEFIFGTLFFSGAILADAVHDFGDAIAIGISAILERKAVKKESPNFSLGYKRFSLLGALTTNLILISGSLLVMIETIPKLWHPTIVNYDGMFVLAIFAIIINGFASFIIHSNQTKNEEILSLHFLEDILGWLAIIILSLILKWKPWYILDPLLSIAIASFILSKALPKLVATANIFLDGVPDSIDYCTLHHELSQLPHIVSVNQLNVWSMDGIDHRATIHCCLRESTTEKHCKKSIRLICQRYNINSVTVEIDTSLNEHQHHCSSLSSIEVN

SEQ ID NO: 441 - DNA, 1260 bp, Streptococcus pyogenes
gtgaaagatgtcatttatgatgtggaagaagtgccaaaggcaggtatgttagttggtttgtcctttcagcacttatttgctatgtttggtgcgactgttctggttcccattctagttggaattgacccatcagttgctttgttatctagtggtttaggaacccttgcccacttatcagtgaccaaatttaaaattccagcctacatgggctcaagttttgcttatatagcagctatgcagttactgatgaagacaaatggtattggtgctgtagctcaaggggctatgacaggaggtctcgtttacctgattgtagctttgattgttaaagctattggcaatgattggattgataacatcttaccaccgattgtggttggtccgattgttatggtcattggtctaagcctagcttctacagctgttaatgatgtcatgctaaaaaatgggaactataatctgacttatcttgttattgggttagtcaccttattatcagttatttttttcaatatttatggtaagggaattgttgctattgtaccgcttttattagggctattagttggttatgttgtagcccttttagtgggtgttctcaccggtcaagaaattgttgattttaccaatgtggctcaggccaaatggtttagtatcccatcagtggaaattcctttcttaacctacggggttaaattctacccaagtgccattttaactatggcacccattgcctttgttacaatgacagaacattttggacacattatggtcttaaatagtttgacaaaaagagattatttcaaggatccaggacttgaaaagactttaactggtgatggttttgcgcaaatcattgccggcttcttaggggcacctccggtcacttcttatggtgaaaacatcggtgtaatggctttgaataaaatattctcggtctatgttattgcaggtgccgcagtgattgccgctctcctcagttttatcggtaaggtatcagccttaattcaatctattccaacaccagttattggaggtatatcagttgccttgtttggtgtgatagcttctagcggtttgaaaatcttgattgaatccaaagttgatatggataataagaaaaacttattgattgctagtgttattttggtctctgggattggaggattgatgcttcaagtaaatggtcttcaaatttcaggtgtcgctttctcaacactccttggcatcatcttatatcaggtacttcctgaaaaatag

SEQ ID NO: 442 - protein, 419 aa, Streptococcus pyogenes
MKDVIYDVEEVPKAGMLVGLSFQHLFAMFGATVLVPILVGIDPSVALLSSGLGTLAHLSVTKFKIPAYMGSSFAYIAAMQLLMKTNGIGAVAQGAMTGGLVYLIVALIVKAIGNDWIDNILPPIVVGPIVMVIGLSLASTAVNDVMLKNGNYNLTYLVIGLVTLLSVIFFNIYGKGIVAIVPLLLGLLVGYVVALLVGVLTGQEIVDFTNVAQAKWFSIPSVEIPFLTYGVKFYPSAILTMAPIAFVTMTEHFGHIMVLNSLTKRDYFKDPGLEKTLTGDGFAQIIAGFLGAPPVTSYGENIGVMALNKIFSVYVIAGAAVIAALLSFIGKVSALIQSIPTPVIGGISVALFGVIASSGLKILIESKVDMDNKKNLLIASVILVSGIGGLMLQVNGLQISGVAFSTLLGIILYQVLPEK

SEQ ID NO: 443 - DNA, 459 bp, Streptococcus pyogenes
atgaaaaaacgattgtttgtgcttagcttgatcctccttgtagctttggatcaacttagtaaattttggattgtttctcatatagcgcttggagaagtgaaaccctttatcccaggtatcgtcagcttgacttacttgcaaaacaatggggctgccttttccatattgcaggaccagcaatggttctttgttgtcataacggttttagttatcggttatgctatttattaccttgctactcatccccatttaaatatctggaaacaattagctctcttgcttattatttctggtggaatcgggaattttattgatcgtttgcgtttagcttacgtgattgatatgattcatttagactttgtggattttgccatttttaatgtggcagattcataccttaccgttggtgtcatattattattgatatgtttatggaaagaagaggattatggaaattaa

SEQ ID NO: 444 - protein, 152 aa, Streptococcus pyogenes
MKKRLFVLSLILLVALDQLSKFWIVSHIALGEVKPFIPGIVSLTYLQNNGAAFSILQDQQWFFVVITVLVIGYAIYYLATHPHLNIWKQLALLLIISGGIGNFIDRLRLAYVIDMIHLDFVDFAIFNVADSYLTVGVILLLICLWKEEDYGN

SEQ ID NO: 445 - DNA, 1287 bp, Streptococcus pyogenes
atgattaatccttcaaaacaaaaccaaacgatttttttatggaatatgttaggaagtttatcaacagctgtaatatcagttatattacttatggtggttactaggttactaacttcggctgattcagatatttacgcctttgcctattcttttgctaatatgatggtagttgttggactttttcaggttcgtaattatcaagcaacagatattaatgaaaaatattcctttagtcagtacttagtggcaagactgatgacttgtttattaatgttagccataacagtaatttatttaacgttaactaagacagatagctacaagagtacaattgtctttctagtctgtttctatagatcgacagatgctttttcggatttatatcagggaatgttccaacaacatgaacggctggatattgcaggtaaatcgctagcctacagaaatactcttatttttatggtgtacacagcaataatattatattccaaaaatcttactttagcattagtagctgtctgtatagtttcattagtttttataatgtattatgacattggtcattcgaaaaaatttcaaaagttgatgtttagtgaattattaagtaatatttcatttcaaaacagtttaaagttattaaaagaaagttttccactttttctaaacggttttttgattatctatatttatactcaaccaaaatacgctattgaactaatgacgactttaggtgaagttgctttgggctctcaaacaatttttaatattttatttatgccagcctttgttatgaatttgctaattttattttttagacctcatattacacagatggctattgctttaatcagaggtcaaataaaagagtttaataagatacaagttcaattgtttgcttatttaggagttttttcactgatagcgttagttggaagtggtttgtttggtattccctttttatcaatactatatggtactaaccttacggattattgggtagattttatgttgattatgctaggaggctcgattggtagttttgcgacagttatcgataatatcttaaccgctatgagaaaacagcaacttcttcttattccatatacaggaggatttttgatttcgttattaattaccaatctttttgttatgaaatatcatattttaggagctgctttgagctttttaataacaatgttggtttggttgggattatccattatgatttatctatttattatgaatagatttaagaagggaagagttaatgcaacaatctatgactaa

SEQ ID NO: 446 - protein, 428 aa, Streptococcus pyogenes
MINPSKQNQTIFLWNMLGSLSTAVISVILLMVVTRLLTSADSDIYAFAYSFANMMVVVGLFQVRNYQATDINEKYSFSQYLVARLMTCLLMLAITVIYLTLTKTDSYKSTIVFLVCFYRSTDAFSDLYQGMFQQHERLDIAGKSLAYRNTLIFMVYTAIILYSKNLTLALVAVCIVSLVFIMYYDIGHSKKFQKLMFSELLSNISFQNSLKLLKESFPLFLNGFLIIYIYTQPKYAIELMTTLGEVALGSQTIFNILFMPAFVMNLLILFFRPHITQMAIALIRGQIKEFNKIQVQLFAYLGVFSLIALVGSGLFGIPFLSILYGTNLTDYWVDFMLIMLGGSIGSFATVIDNILTAMRKQQLLLIPYTGGFLISLLITNLFVMKYHILGAALSFLITMLVWLGLSIMIYLFIMNRFKKGRVNATIYD

SEQ ID NO: 447 - DNA, 696 bp, Streptococcus pyogenes
gtgaaaaagttaatcattattcctgcttacaatgaaagcagtaatattgtcaatactatacgtactattgaatcagatgccccggattttgactatatcattattgatgattgctcaacggataatacgttagcaatatgtcaaaaacaggggttcaatgttatttctttgcccattaacctgggaattggcggtgcggtgcaaactggctatcgttatgcacaaagatgtggatatgacgttgcagttcaagtagatggagatggtcagcacaatccatgctatttggaaaaaatggttgaggtattagttcaatcttcagtaaatatggtaattggatcacgatttatcacaaaagaagggtttcagtcatcatttgctcgacgtatcggcataaagtattttacttggcttattgcgctactaacaggaaaaaaaataacagatgcaacgtcaggtctaaggttaattgaccgttcattgattgaacgttttgctaatcattatccagatgattatcctgaacctgaaacagttgttgatgtattggttagtcattttaaagtgaaagaaattcctgttgtaatgaatgagcgacaaggcggtgtgtcatctatctcgttgacgaaatcggtctattatatgattaaagtgactttagctattttagttgttagattgaaaggaaatcgttaa

SEQ ID NO: 448 - protein, 231 aa, Streptococcus pyogenes
MKKLIIIPAYNESSNIVNTIRTIESDAPDFDYIIIDDCSTDNTLAICQKQGFNVISLPINLGIGGAVQTGYRYAQRCGYDVAVQVDGDGQHNPCYLEKMVEVLVQSSVNMVIGSRFITKEGFQSSFARRIGIKYFTWLIALLTGKKITDATSGLRLIDRSLIERFANHYPDDYPEPETVVDVLVSHFKVKEIPVVMNERQGGVSSISLTKSVYYMIKVTLAILVVRLKGNR

SEQ ID NO: 449 - DNA, 2475 bp, Streptococcus pyogenes
atgattaaagacacatttttaaaaaccaattggttaaatattagtcaccatattatccttcttgttttcggtttttatttcagtttttacagtttggcgaaagaactagtaagctccacggcacaaccggtaaactattatgctcatttactaaatgtttcttttgtgggatatattatatcactgattggattatcttattatttgagtcgccaagttagtcgacagttgtttttgaaaactagttttattgtgatatcttatctaattgtcagctattgggtacaaataacacagcacctgaatgataaacggtttgatatctggtcattaactaaaaatcaattttatcaatttcaagctctaccttctttactcattattttagtgatggccactttaataaaaatattggcagcatattttgcaatagaaaaagatagatttgggctattaggctatcaaggtaatactttttctgtagctctgattttagcagttgtgccaattaatgacatacatctgttaaaactaataagttctcgattttctgaattagtaacagcaggtaatagccaaattgcactgttaaaaataagtggactgttgatagttttacttgtcatatttgcaacaatcatatacgtggttttaaatgctctaaaacaccttaagtcaaataaaccttcattttcagtagcagctactactagtttgtttttagcattagtttttaactatacgttccagtatggagtaaaaggtgatgaagcattgctaggatattatgttttccctggagctactctttttcagatagtagctattacactagttgctcttttagcatacgtgataacgaatagatattggccaactaccttctttttgcttattctgggaacaattatttctgttgttaatgatttaaaagaatcaatgagaagcgagccgttattagtaactgattttgtttggttacaagaattaggtttagtgacaagctttgttaaaaaatcggtgattgtagaaatggttgtaggacttgctatttgtattgtggtagcttggtatctacatggccgagttttagcagggaaattatttatgagccctgtcaaacgggcaagtgctgtattaggtttatttattgtatcttgtagtatgttaataccattttcttatgaaaaagaaggtaaaatattatctggtcttccgattatttcggctttaaataatgataatgacataaactggttaggtttttcaacaaatgctaggtacaaatctttagcatatgtttggacaagacaggtgaccaagaaaataatggaaaaaccgacaaattatagccaagaaacaatagcgagtatcgctcagaagtaccaaaaattagcagaagatattaataaagacagaaaaaataatattgctgaccaaacggttatttatcttttaagtgaaagcttgtcagatcctgatagagtatcaaatgttactgttagccacgatgttttacctaatatcaaggcaatcaaaaatagcacaactgcgggactcatgcagtcagactcctacgggggtggaacggctaacatggagtttcaaacgttaacaagcttacctttttataatttttcttcttcagtatctgttctttattcagaagtctttcctaaaatggccaaacctcatacgattagtgagttttaccaaggaaaaaatcgtattgcgatgcatcctgctagtgctaacaattttaatagaaaaacagtttatagtaatttaggtttttccaaattcttagctctatcgggttctaaggataagtttaagaacattgaaaatgtcggtttattgactagcgataaaactgtctataataatattttatctttaattaatcctagtgaaagccaatttttctcagttattacaatgcaaaatcatattccttggtcatccgattatcctgaagaaattgttgctgaaggaaaaaatttcacggaagaagaaaatcacaacctaacaagttatgctcggttattatcgtttactgataaggaaacaagagcatttttagaaaaattaacacaaattaacaagcctatcacagtggtgttttacggagatcatttacccggtttatatcctgatagtgcttttaacaagcatattgaaaataaataccttactgattattttatttggagtaatggtactaacgagaaaaaaaatcatccgcttatcaactcaagtgattttactgcagctttatttgagcatactgattcaaaagtatcaccttactatgctttgttaacagaggtactgaataaagctagtgtcgataaatcaccagatagtcctgaagttaaagctattcagaatgatttaaaaaatatccaatacgatgtgactataggaaaaggttaccttttgaaacacaaaactttttttaagatatcacgttaa

SEQ ID NO: 450 - protein, 824 aa, Streptococcus pyogenes
MIKDTFLKTNWLNISHHIILLVFGFYFSFYSLAKELVSSTAQPVNYYAHLLNVSFVGYIISLIGLSYYLSRQVSRQLFLKTSFIVISYLIVSYWVQITQHLNDKRFDIWSLTKNQFYQFQALPSLLIILVMATLIKILAAYFAIEKDRFGLLGYQGNTFSVALILAVVPINDIHLLKLISSRFSELVTAGNSQIALLKISGLLIVLLVIFATIIYVVLNALKHLKSNKPSFSVAATTSLFLALVFNYTFQYGVKGDEALLGYYVFPGATLFQIVAITLVALLAYVITNRYWPTTFFLLILGTIISVVNDLKESMRSEPLLVTDFVWLQELGLVTSFVKKSVIVEMVVGLAICIVVAWYLHGRVLAGKLFMSPVKRASAVLGLFIVSCSMLIPFSYEKEGKILSGLPIISALNNDNDINWLGFSTNARYKSLAYVWTRQVTKKIMEKPTNYSQETIASIAQKYQKLAEDINKDRKNNIADQTVIYLLSESLSDPDRVSNVTVSHDVLPNIKAIKNSTTAGLMQSDSYGGGTANMEFQTLTSLPFYNFSSSVSVLYSEVFPKMAKPHTISEFYQGKNRIAMHPASANNFNRKTVYSNLGFSKFLALSGSKDKFKNIENVGLLTSDKTVYNNILSLINPSESQFFSVITMQNHIPWSSDYPEEIVAEGKNFTEEENHNLTSYARLLSFTDKETRAFLEKLTQINKPITVVFYGDHLPGLYPDSAFNKHIENKYLTDYFIWSNGTNEKKNHPLINSSDFTAALFEHTDSKVSPYYALLTEVLNKASVDKSPDSPEVKAIQNDLKNIQYDVTIGKGYLLKHKTFFKISR

SEQ ID NO: 451 - DNA, 1008 bp, Streptococcus pyogenes
atgtataaagtttcaattatttgcaccaattataacaaagctccttggatatctgatgcacttgacagttttttaagccaagtgacagattttgaggttgaaattattgttattgatgatgcttctacagatgactcacgagagattttaaagagttatcaaaaaaagtcttcaggaaaaattaaattactctttaacgaaactaatattggaataacaaagacttggataaaagcatgcctttatgcaaaaggcaaatatattgctagatgtgatggtgatgattactggacggatagttttaaactccaaaaacaagttgatgtcttagaagcttccaaacggtcacgatggtgtaatactgattttgactttgtaaatagtcaaggcgacttattatatgctaatgctttttcatctggtcatacacctttgacagatacttacgaaaaagttttagccttaaaagggatgacgatggcatcgacatggttagttgatgctgatttaatgagacaagtaaaccaaaaaatcaatgtagatacaccagacgatacttttgatattcaactagagttatttcaactgactcaactgacctatattaaagactcaacgacgatttatcgcatgacaaccgattctgattcaagacctactgatacaccaaaaatgatttatcgtattcaaaaactacttgatactcagttaaattacttaaaaaagtataatcaggtagatacaaaagaagtgtctgaactattattacaacaagatgctaagcaagaaatacgaattcatgagttgagttgctttattcaagaattacaacaaactatcgtagataaaacaaagcagcaagaaacacgtgaagtggagttgcaaaatgtcatagaagaacaaaaaaatcaactatctgaattaagacaacaataccatgccattattaattcacgtcaatggaaatacacgtctaagctcattgcttttattaggagaaaaaaatga

SEQ ID NO: 452 - protein, 335 aa, Streptococcus pyogenes
MYKVSIICTNYNKAPWISDALDSFLSQVTDFEVEIIVIDDASTDDSREILKSYQKKSSGKIKLLFNETNIGITKTWIKACLYAKGKYIARCDGDDYWTDSFKLQKQVDVLEASKRSRWCNTDFDFVNSQGDLLYANAFSSGHTPLTDTYEKVLALKGMTMASTWLVDADLMRQVNQKINVDTPDDTFDIQLELFQLTQLTYIKDSTTIYRMTTDSDSRPTDTPKMIYRIQKLLDTQLNYLKKYNQVDTKEVSELLLQQDAKQEIRIHELSCFIQELQQTIVDKTKQQETREVELQNVIEEQKNQLSELRQQYHAIINSRQWKYTSKLIAFIRRKK

SEQ ID NO: 453 - DNA, 933 bp, Streptococcus pyogenes
atgaacattaatattttactatccacctacaatggagaacgcttcttagcagaacaaattcaaagtatccaaaggcaaacagttaacgactggaccttattgattagagatgatggttcaactgatggcacccaggatattattcgcacatttgtcaaggaagacaaacgaattcagtggatcaatgaggggcagacagaaaatctgggagttattaagaatttttacaccctcttaaagcaccaaaaagcagatgtctattttttcagtgaccaagatgatatatggttagacaataaactggaagtgaccttattggaggctcaaaaacatgaaatgacagctcctttattggtttatacagacctcaaagtggtaacccaacatttagctgtttgccatgacagtatgattaagacccaatctggtcatgcaaacacaagcctacttcaagaattaaccgaaaataccgtaacaggcggcacaatgatgattactcatgctctggctgaggaatggaccacttgtgacggtttattgatgcatgactggtatttagctttactagcttctgctattgggaaattagtttaccttgatattccaacagaattataccgtcagcacgatgctaacgtgttgggagctagaacttggtctaaacgcatgaaaaattggttaaccccccatcatttagtcaacaaatattggtggttgattacttcaagccaaaaacaggctcaattactattagatttaccattaaaaccaaatgaccatgaattggtaacggcctatgtttctttattggatatgccttttaccaaacgcttagctaccttgaaaaggtacggttttagaaaaaatcgcatctttcacacctttatttttcgtagtttagttgttaccttatttggttacaggagaaagtaa

SEQ ID NO: 454 - protein, 310 aa, Streptococcus pyogenes
MNINILLSTYNGERFLAEQIQSIQRQTVNDWTLLIRDDGSTDGTQDIIRTFVKEDKRIQWINEGQTENLGVIKNFYTLLKHQKADVYFFSDQDDIWLDNKLEVTLLEAQKHEMTAPLLVYTDLKVVTQHLAVCHDSMIKTQSGHANTSLLQELTENTVTGGTMMITHALAEEWTTCDGLLMHDWYLALLASAIGKLVYLDIPTELYRQHDANVLGARTWSKRMKNWLTPHHLVNKYWWLITSSQKQAQLLLDLPLKPNDHELVTAYVSLLDMPFTKRLATLKRYGFRKNRIFHTFIFRSLVVTLFGYRRK

SEQ ID NO: 455 - DNA, 1077 bp, Streptococcus pyogenes
atgtttttagcgcttaatgaaatgaaacaatccaaattgcggtatggtttgattgctggtttgctatgtttggttgcctatttgatgttctttttgtcaggattggcctttggtttgatgcaggagaaccgctcggcggttgatctttggaaagctgacagtgttttactagccaaggatgctgacgctaccttgaccttatcacaggtgtccagagctcaagaaaatcaaataacagcagacaaggtagctcctcttgctcaactcaataccgtggcgtggtcagttaaaaatcctaaggatgccgacaaagttaaggttagccttttcgggattgattctaatagctttattcgtcctaacattgtaaaaggtcgattatttaagactaacaaagaggttgttttggatcaaagccttgcaaaagaggaagcttttgcgattggcaaggacttttacacatcgagttctagtcaagcattaactatcgttggttatactcaaaatgctagatttagtgttgcaccagtggtttatatgaatttggaagcttttgaaacattaaaatatggagaaccactaccaaaagataagcaagttgttaatgcttttatcactaaaggaagtttaacagattatcctaaaaaagacttccaaaaattagatattaaaacctttattactaaattacctggttatagcgctcaacttttaacttttggctttatgattagttttcttgtcattatttcagctattattattggtatttttatgtatattttgactattcaaaaggcacctatttttgggattatgaaagcgcaaggaatttctaacaaaacgattacgaccgctgtgcttatgcagacattctttttgagttttttaggtagtggtttagggttgctaggtacttggctgacatcattattattaccaacagtagtaccttttcaaagcaattggtttttgtatttggctatattcgttagtatgatctgttttgctctattaggcaccttattttctgtttttaacattatacgaattgatcctttgaaagcaattggatag

SEQ ID NO: 456 - protein, 358 aa, Streptococcus pyogenes
MFLALNEMKQSKLRYGLIAGLLCLVAYLMFFLSGLAFGLMQENRSAVDLWKADSVLLAKDADATLTLSQVSRAQENQITADKVAPLAQLNTVAWSVKNPKDADKVKVSLFGIDSNSFIRPNIVKGRLFKTNKEVVLDQSLAKEEAFAIGKDFYTSSSSQALTIVGYTQNARFSVAPVVYMNLEAFETLKYGEPLPKDKQVVNAFITKGSLTDYPKKDFQKLDIKTFITKLPGYSAQLLTFGFMISFLVIISAIIIGIFMYILTIQKAPIFGIMKAQGISNKTITTAVLMQTFFLSFLGSGLGLLGTWLTSLLLPTVVPFQSNWFLYLAIFVSMICFALLGTLFSVFNIIRIDPLKAIG

SEQ ID NO: 457 - DNA, 483 bp, Streptococcus pyogenes
atgccttacttactaagtcgacacgacagtatcgaaatcgctatcaaacggataatgcttatcgtaactttaagcccagcaggttggcaccgattgcaccacttaaaaggaagttatgatcacgcggttgatagagggcatttgctaggttatgctttagttggtggactgaaaggttttgatgcttctactggtaatcctgataatattgccactcaactaagttgggctaatcaagcaaataaaccctacttgacaggtcagaattactatgaaggtttagtacgtcgtgctttagataaggggcatcgcgtccgctaccgtgtcaccctactttatgatggtgataatctactagccagcggtagccatttggaggctaaatcctctgatgacagcttgacttttaacgtgtttgttccaaatgtccaagcaggattgaccgctgactatcggacgggacaaatagctatcaatctctaa

SEQ ID NO: 458 - protein, 160 aa, Streptococcus pyogenes
MPYLLSRHDSIEIAIKRIMLIVTLSPAGWHRLHHLKGSYDHAVDRGHLLGYALVGGLKGFDASTGNPDNIATQLSWANQANKPYLTGQNYYEGLVRRALDKGHRVRYRVTLLYDGDNLLASGSHLEAKSSDDSLTFNVFVPNVQAGLTADYRTGQIAINL

SEQ ID NO: 459 - DNA, 495 bp, Streptococcus pyogenes
atgtcaatcacatttggtgaactcgttgggaattttattctagtaacaggttctgtaatcgtcttgttactcttgatcaaaaaattcgcttggggtgcgattgaatcgattttacagacacgctcacaacaaatctctcgagatattgatcaggctgagcaatcacgtctaagtgctcaacagttagaggcaaaaagtcaagctaacctagatgctagtcgtttacaagcaagtaaaatcattagtgatgccaaagaaattggtcaattacaaggtgataaattggtggcagaagctactgatgaagcaaaacgcttgaaagaaaaagcgttgacagatattgaacaaagcaaatcagacgctatttcagcagtcaaaacagaaatgtctgatttaacggttcttttagcggaaaaaattatgggagccaatcttgataagacggcgcaaagccagcttattgacagttatcttgatgacttaggagaagcttaa

SEQ ID NO: 460 - protein, 164 aa, Streptococcus pyogenes
MSITFGELVGNFILVTGSVIVLLLLIKKFAWGAIESILQTRSQQISRDIDQAEQSRLSAQQLEAKSQANLDASRLQASKIISDAKEIGQLQGDKLVAEATDEAKRLKEKALTDIEQSKSDAISAVKTEMSDLTVLLAEKIMGANLDKTAQSQLIDSYLDDLGEA

SEQ ID NO: 461 - DNA, 717 bp, Streptococcus pyogenes
atggaagaagctaaaatacctatgctgaagcttggtccaataacctttaatttgaccctacttgctgtttgtattgtcacaattgcgattgtctttgcctttgttttttgggcaagtcgccaaatgaaattgaaaccagaagggaagcaaactgctttagaatatttaatcagttttgtggatggtattggagaagagcacttagatcataatctacaaaaatcttattcgctgttactctttaccatttttctctttgtggctgtcgctaataatttagggttatttactaagttagagacagttaatggctataacctatggacctcgccaacagccaatctggcttttgaccttgctctatctctttttattaccttaatggtacacattgaaggggttagacggcgtggcttggttgcccatttgaaacgtttggctacaccgtggccaatgactccgatgaatttattagaagagttcacaaatttcttatcacttgccattaggttattcggtaatatctttgccggggaagttgttacaggtttgattgttcaactggccaattatcgagtttattggtggccgattgctttcctagtcaatatggcgtggacagccttttcagtctttatttcctgcatacaggctttcgttttcacaaaactgacagcgacctatctaggaaagaaagtcaatgaatcagaagaataa

SEQ ID NO: 462 - protein, 238 aa, Streptococcus pyogenes
MEEAKIPMLKLGPITFNLTLLAVCIVTIAIVFAFVFWASRQMKLKPEGKQTALEYLISFVDGIGEEHLDHNLQKSYSLLLFTIFLFVAVANNLGLFTKLETVNGYNLWTSPTANLAFDLALSLFITLMVHIEGVRRRGLVAHLKRLATPWPMTPMNLLEEFTNFLSLAIRLFGNIFAGEVVTGLIVQLANYRVYWWPIAFLVNMAWTAFSVFISCIQAFVFTKLTATYLGKKVNESEE

SEQ ID NO: 463 - DNA, 1128 bp, Streptococcus pyogenes
atggttttatttcatttaatcaaaaaagaaagtttacagatttttagaaaccgaacagccttattgatgatggtgatttttccaattttgatgatcgttattttaagttttgcctttaaatcaagttttaatactgcgacaacagtccctaaattgaccattcgttaccaattagagggtgaaaaaacggattaccagaaaaattttcttgcttttttaaaagttttaaaccaaaaacttcatttagagactaaacctagtaattctcttgaaaaagatcgacaaagggtcagtgaaggagccttaacggctgttttagaagtgaagaagaatcagaccattaaggttattactaataatattaatcagcaaaatgcagatttgatcaatatgctagtaaaaaattatgttgataatgctaaaacttatgactcgatagcagctctttatcctcaacaattaaatcatatcagaaagcgaagtgtggactatgttaaggtcagttcaatacagacaagtaaaggaatgacatcagctgattattatgctatttccatgtttaccatgattactttttatagtatgatgtctgcgatgaaccttgttttgtcagatcgtcaacaacggattacaaatcgtattcacttaacaggagtttctccaagttttttggtctttgggaaattaataggtgctatgttagcaacaactgttcaattgagtcttttatacatttttacaaggtttgttttacgagttaattggggcactaatgagtggatgcttattggtataacagcctccttagtctatctctctgtagctataggtatcgggctaggtataagcattaaaaatgaggcttttttaacggttgcatccaatactattattcctatattcgcctttttaggaggcagttacgttccattgacaacattacacagctctattattaatcaattgtcgaatatatctcctattaaatgggttaatgatagtttgttctatcttatttttggtggtcaatataatccgattcctgtaactttgatcgttaatattagtatcggaacaatttttataatattggcattgataggtatgagaaagcaggtgacgacatga

SEQ ID NO: 464 - protein, 375 aa, Streptococcus pyogenes
MVLFHLIKKESLQIFRNRTALLMMVIFPILMIVILSFAFKSSFNTATTVPKLTIRYQLEGEKTDYQKNFLAFLKVLNQKLHLETKPSNSLEKDRQRVSEGALTAVLEVKKNQTIKVITNNINQQNADLINMLVKNYVDNAKTYDSIAALYPQQLNHIRKRSVDYVKVSSIQTSKGMTSADYYAISMFTMITFYSMMSAMNLVLSDRQQRITNRIHLTGVSPSFLVFGKLIGAMLATTVQLSLLYIFTRFVLRVNWGTNEWMLIGITASLVYLSVAIGIGLGISIKNEAFLTVASNTIIPIFAFLGGSYVPLTTLHSSIINQLSNISPIKWVNDSLFYLIFGGQYNPIPVTLIVNISIGTIFIILALIGMRKQVTT

SEQ ID NO: 465 - DNA, 672 bp, Streptococcus pyogenes
atgcctttgtccatccaatgccttaatctttgttttttgttggtaactttttgtccttcaattcctatgcaagctatttttggaaaggaagatagtggttatgcatttaatttaattggttttctaagagcaactctgatttatgacattttggctttggtaagtatttatgttttgtcacctcaaataaccttgtctcttgaaagtattgatagtaagacgttctttatgggacttgtattttgcgtcttgatagtactgattgaactcgttttcttacatggtttacgttgttggcaaaaaaagcaatggcttcctgcaactttctcgtttgtaggaacgacaaatgattggtctaagattggctatcctttattactagctttatttgaagagacgatttatcgttttttgtggtttaatatattagcttttcaatggcatttaccaacaattattgttttaattgtaactagtttttgctatgctttaaatcacttattgatggggaaatccattttttatgctaagttggtaacaggcatcatttatggtagtatttacatgctgactagtcaattgtggttggttgtgataatgcatgtaggaggtaacttgctagttgagtgtcttagccatcttcaaacaaaaaagaagaaggaggtgacatga

SEQ ID NO: 466 - protein, 223 aa, Streptococcus pyogenes
MPLSIQCLNLCFLLVTFCPSIPMQAIFGKEDSGYAFNLIGFLRATLIYDILALVSIYVLSPQITLSLESIDSKTFFMGLVFCVLIVLIELVFLHGLRCWQKKQWLPATFSFVGTTNDWSKIGYPLLLALFEETIYRFLWFNILAFQWHLPTIIVLIVTSFCYALNHLLMGKSIFYAKLVTGIIYGSIYMLTSQLWLVVIMHVGGNLLVECLSHLQTKKKKEVT

SEQ ID NO: 467 - DNA, 759 bp, Streptococcus pyogenes
atgaaattatctaaacaaaaggcaagtttgcttaccgctgttttactgttactttctctttctataacgacaataactgttgacgcagctagggtacgaacttatccgaatgtatcccatgcaaacacacattataaaaatactgtttctagtaagctcttaccttttactgctaattatcagttacaacttggtgagttggataaccttaaccgcgctaccttttcacatatccaactgcaagatagacacgaaactaaagatgtacgcactaaaataaattatgaccctgtgggatggcacaactatcaatttccatacggagatggctcaaaatcttcatgggtaatgaatcgtgggcatctagtcggatatcaattttgtggattaaacgatgaaccaagaaatttagtggcaatgacagcctggctaaacacaggtgcttattcaggagcaaatgacagcaatcctgaagggatgttatactatgaaaaccgtttagattcttggcttgcacttcaccctgacttttggctagattataaagtcactcctatatatagtggcaatgaagtagtgcctcgacaaattgaattacagtatgttggaattgattcatctggtgagttgcttactataaggctaaatagtaataaagaaagtattgatgaaaatggtgttactacagtaatcttagaaaactctgctccaaatatcaaccttgactatttaaatggaactgccactcctaaaaactaa

SEQ ID NO: 468 - protein, 252 aa, Streptococcus pyogenes
MKLSKQKASLLTAVLLLLSLSITTITVDAARVRTYPNVSHANTHYKNTVSSKLLPFTANYQLQLGELDNLNRATFSHIQLQDRHETKDVRTKINYDPVGWHNYQFPYGDGSKSSWVMNRGHLVGYQFCGLNDEPRNLVAMTAWLNTGAYSGANDSNPEGMLYYENRLDSWLALHPDFWLDYKVTPIYSGNEVVPRQIELQYVGIDSSGELLTIRLNSNKESIDENGVTTVILENSAPNINLDYLNGTATPKN

SEQ ID NO: 469 - DNA, 267 bp, Streptococcus pyogenes
atgaataaacgcattaagaaaaaacgtaaactagaaacagcagttgtgatgcttgttgcagaaaatgccatgcaggttgaagcaattaaaaatcaaaacaaacaaatcatggagctaaaatcaatcgttcaacgaaacgctctggcaacaaacgaagagttagcgactgttaaagctgctactttagataaccaatcagttatcaaggcaattggtgacacggttgactatattaagaaaaactacaaacggaagtgggggaaataa

SEQ ID NO: 470 - protein, 88 aa, Streptococcus pyogenes
MNKRIKKKRKLETAVVMLVAENAMQVEAIKNQNKQIMELKSIVQRNALATNEELATVKAATLDNQSVIKAIGDTVDYIKKNYKRKWGK

SEQ ID NO: 471 - DNA, 849 bp, Streptococcus pyogenes
atgagaagaaaaataaaacctattgttgtgctagtcttctttattttactggcaatggtattgattatcggaaaaagacaagctaatcatgcgaaacaaaaagaagttgaagacgctaagagtcatattcctattgcaaccagtaatcctggtaaagcaaaaactagcacttctgaaaccgaagactttattttaaatcctattgttgatgtttccggctggcaactccctgaagaaattgattatgacacattgtcacgtcacatctctggcgcaattgtacgtgtctatggaggatcgcaaattacagctcataacaacgctgcttttacaactggaattgacaaatcttttaaaacgcatatcaaagaatttcaaaaacgaaatgttcctgtagctgtttacagttacgcacttggtcgtagtactaaagagatgaaagaagaggcccgagctttctacaaaaacgctgctccctataatccaacttactactggattgatgtcgaagaagccactatgaaagatatgaataaaggcgtaacagccttccgagaagagcttaaaaaacttggtgctgaaaatgttggtctctatattggaacttattttatggcagaacaagatatttcaacaaaaggtttcgattctgtatggattccgacttatggtagtgattctggctattatgaggctgctcctaatacaaccttagattacgatttacaccaatacacctcacaaggttatctcagtggttttaacaatgctttagatttaaatcaaattgccgtaacaaaagacactaaaaaaacgtttgagaagttatttggcaactccaacaattaa

SEQ ID NO: 472 - protein, 282 aa, Streptococcus pyogenes
MRRKIKPIVVLVFFILLAMVLIIGKRQANHAKQKEVEDAKSHIPIATSNPGKAKTSTSETEDFILNPIVDVSGWQLPEEIDYDTLSRHISGAIVRVYGGSQITAHNNAAFTTGIDKSFKTHIKEFQKRNVPVAVYSYALGRSTKEMKEEARAFYKNAAPYNPTYYWIDVEEATMKDMNKGVTAFREELKKLGAENVGLYIGTYFMAEQDISTKGFDSVWIPTYGSDSGYYEAAPNTTLDYDLHQYTSQGYLSGFNNALDLNQIAVTKDTKKTFEKLFGNSNN

SEQ ID NO: 473 - DNA, 480 bp, Streptococcus pyogenes
atggctaaaaaaacaaaactcaaaaaaaccttagtagaacaaatcctcgataaggctaatattgctcatcaaggactcaagcttaatgctttagaaggcgactttccagatgatcttcaaccatcagatatttacaagacacttgctctgactggtgatcaaacaggtcctctaattggcattattccattaacagaacacttatcagaaaaacaattggcaaaagtatcaggtaacaaaaaagtgtccatggttcctcaaaaagacttgcaaaagacaacaggctatattcacggtgccaataatcctgttgggattcgtcaaaaacattcatatcctatttttattgaccaaactgcactggaaaaaggtcaaataatcgtttcagctggtgaagttgggcgttctataaagatttctagccaggctctagctgatttcgttggcgcaagctttgctgatttaaagaagagaaaatga

SEQ ID NO: 474 - protein, 159 aa, Streptococcus pyogenes
MAKKTKLKKTLVEQILDKANIAHQGLKLNALEGDFPDDLQPSDIYKTLALTGDQTGPLIGIIPLTEHLSEKQLAKVSGNKKVSMVPQKDLQKTTGYIHGANNPVGIRQKHSYPIFIDQTALEKGQIIVSAGEVGRSIKISSQALADFVGASFADLKKRK

SEQ ID NO: 475 - DNA, 408 bp, Streptococcus pyogenes
atggacttagttggaatctcactgatgattattgcactcgcatttgttgctttggtgattttcttgattattgtattaaagaaagtctcagaaacaattgatgaagccaaaaaaacgatttctgtattgacaagtgatgttaatgtgacacttcatcaaactaatgatattttagcaaaagctaatatccttgttgaagatgttaatggtaaagtagcaaccatcgatccactgtttgttgctattgctgatttgtcagaaagtctttcagatttaaatagtcaagcaaggcattttgggcaaaaagcaactaatgctacaggtaatgtttcaaaagctggaaaattagcattagttggtaaagtagcctcaaaagtatttggaaaaaaaggagaaaagcatgaataa

SEQ ID NO: 476 - protein, 135 aa, Streptococcus pyogenes
MDLVGISLMIIALAFVALVIFLIIVLKKVSETIDEAKKTISVLTSDVNVTLHQTNDILAKANILVEDVNGKVATIDPLFVAIADLSESLSDLNSQARHFGQKATNATGNVSKAGKLALVGKVASKVFGKKGEKHE

SEQ ID NO: 477 - DNA, 780 bp, Streptococcus pyogenes
atgatcaatcccattgccttaaaatgtggtccactagccatccactggtatgctctatgtatcttgtcaggacttgttttggcggtttacttagcatcaaaagaagcacccaaaaaaggaatatcatctgatgctattttcgattttattctgattgcttttccacttgctattgttggtgcaagaatttactatgttatttttgaatggtcttattatgtcaagcatttagatgaaatcatagccatttggaatggcggtattgctatttatggcggtctcattacaggagctcttgtacttttggcttactgttataacaaggtgctcaatcccattcattttttagatattgccgcaccaagtgtcatggtcgctcaagctatcggtcgctggggaaattttatcaaccaagaagcctatggtaaagctgtgagccagttaaattacttaccaagctttattcaaaagcaaatgtttatagagggaagttaccgcattccgacctttctctatgaatcactttggaatcttttgggctttgtcattattatgatgtggcgtcgtaagccaaaaagtctattagatggagaaatctttgcattttacttaatttggtatggtagtggaagactagtcattgaaggtatgcgaacagatagtcttatgtttttaggtattcgcatctcccaatatgtgtctgccttattaattattattggcttaatctttgttataaaaagacgtcgtcaaaaaggaatttcttattatcaagaataa

SEQ ID NO: 478 - protein, 259 aa, Streptococcus pyogenes
MINPIALKCGPLAIHWYALCILSGLVLAVYLASKEAPKKGISSDAIFDFILIAFPLAIVGARIYYVIFEWSYYVKHLDEIIAIWNGGIAIYGGLITGALVLLAYCYNKVLNPIHFLDIAAPSVMVAQAIGRWGNFINQEAYGKAVSQLNYLPSFIQKQMFIEGSYRIPTFLYESLWNLLGFVIIMMWRRKPKSLLDGEIFAFYLIWYGSGRLVIEGMRTDSLMFLGIRISQYVSALLIIIGLIFVIKRRRQKGISYYQE

SEQ ID NO: 479 - DNA, 1863 bp, Streptococcus pyogenes
atgacgtatcaagaaactgccaaggctattttagcggcggttggtggcaaaacaaatattcaacgtgtgacacactgtgtaacacgtctacgcttagtactgaaaaatgatgagaaagttaaagatcagcaagtcaaagccatttcaaatgtgattggcgtgatgcgcaaaaacggccagtaccaaattatcttgggcaatgatgtcaataattattaccaagcctttttaagcctagggcattttgacaatcaagatgaagatcattcttcaaaagcgaaaggaagtatccttgagcgcttgattgaaaccattgctggcgtgattacaccgctgattccagcccttcttggtggtggaatgctcaaagtggtgggaatcttgcttcctatgcttggcttagcgagtgcggactctcaaaccgttgcctttattaacttctttggcgatgcggcttattattttatgcctgtcatgattgcctattcagcagcggcgcgctttaaggtgacacctgttttagcagcgacgatcgcagggattttattgcatcctgcctttgttgcaatggtagcagaaggtaaaccattgactttatttggagcaccagtcactcctgctagctatggctcatctgttattcccattttgatgatggtttacttgatgcaatacattgaaaaatgggtcaatcgcttggtgccaagcgtgatgaaaagcttcttacagccaaccttaatcattttgatttctggctttttggctttagtggttgtaggtcctcttggtgtgattattggtcaagggttatctaataccatgctcgctatttatcatgtggctccgtggctagcacttgctattttgggagcgattatgccgcttgttgtcatgacggggatgcactgggcttttgcaccaatctttttggccgcttcggtcgcaacaccagatgtcttgattttaccagcaatgttggcttctaatttggctcaaggagccgcatctttggctgttgcctttaaaacaaagcagaaacaaacacgtcaagttgcccttgccgcggggatttcagctttgctggcaggtatcacggaaccggcactttatggggtcacactgaaatttaaaaagccactctatgcagccatgatttcaggtggtctggttggagcctttattggttttgtcaatattgcttcttatacctttgtcgtaccttctattattggtttaccacagtacatcaacccatcaggcggagctaattttacaaatgctttgattgccggaactgcgacgattgtgttagccttcagtttgacttggttcatgggaattgatgaagagtccccaaagcaagtgagtgttgcagcagatatgtcacaagttaagagcggcttgtcaaccaaacaaacgttgtatgctccaatgacaggtgagatgctttttctatcagaagttcctgatgaaaccttttcttccaagttattaggagaaggatttgccatattaccaagcgaaggtgaggtctatgccccctttgatggtgaagtcatcactttctttccaaccaagcatgctgttgccttaaaaaacacacgtggtgtggaagtcttgattcatgtcggtattgatacggttgagttaaaagggcaaggtttcgagcagttagtgtctgttggcgatgtcgtgaaacgaggccaggcacttctaaaaatggatattgatttcattacttcaaaaggctattcactcatcagtcctgtggtcgtgaccaattcggctgagcagttggagattattattcaagatgacaaaaaaatggtgactaaagaggacgctttgttagtcattttataa

SEQ ID NO: 480 - protein, 620 aa, Streptococcus pyogenes
MTYQETAKAILAAVGGKTNIQRVTHCVTRLRLVLKNDEKVKDQQVKAISNVIGVMRKNGQYQIILGNDVNNYYQAFLSLGHFDNQDEDHSSKAKGSILERLIETIAGVITPLIPALLGGGMLKVVGILLPMLGLASADSQTVAFINFFGDAAYYFMPVMIAYSAAARFKVTPVLAATIAGILLHPAFVAMVAEGKPLTLFGAPVTPASYGSSVIPILMMVYLMQYIEKWVNRLVPSVMKSFLQPTLIILISGFLALVVVGPLGVIIGQGLSNTMLAIYHVAPWLALAILGAIMPLVVMTGMHWAFAPIFLAASVATPDVLILPAMLASNLAQGAASLAVAFKTKQKQTRQVALAAGISALLAGITEPALYGVTLKFKKPLYAAMISGGLVGAFIGFVNIASYTFVVPSIIGLPQYINPSGGANFTNALIAGTATIVLAFSLTWFMGIDEESPKQVSVAADMSQVKSGLSTKQTLYAPMTGEMLFLSEVPDETFSSKLLGEGFAILPSEGEVYAPFDGEVITFFPTKHAVALKNTRGVEVLIHVGIDTVELKGQGFEQLVSVGDVVKRGQALLKMDIDFITSKGYSLISPVVVTNSAEQLEIIIQDDKKMVTKEDALLVIL

SEQ ID NO: 481 - DNA, 1368 bp, Streptococcus pyogenes
atgtcacatcatcaacaaaccgtttcaaaacaaacaattatggcgattatcgccatagcactcattggtttttcaggaattttgtctgaaaccagtatgaatgtcaccttcccgacactgatgtcagtctatcagttacccttaaatagcttgcaatggatgacgaccatttatttactagcagtggcgattatgatgaccacttcggctacactgaaaaaaaatgtgcgggaaagacccctcttttttatggccacaggtctttttacatttggcaccatcttggccgttctgacccagtcctttgcgatcatgttgctagcccgcatttttcaaggcattggtactggtctggtaatgcctcagatgtttaatattattttagagcgtgtcccaatgcataaggtaggtctatttatgggatttgctggtcttattattagcttagcacctgcttttgggcctacttatgggggctttatgattagccattttagttggcaatggatttttatctgtatactccctgtaccactgattgcaggtattctagcttattattacctcgaagattctccagtaagcgaaaaagtaccctttgactggttggcatttattgcactatcgattagcttaacttctgccttattagctattactagtctagaaaacggcagtgttaatttgtattacttagggctttttattctcagctttatcctcttcctctacaagaatctcacagctaagcaaccctttcttgatattcgcattctcaaaattccctctctaacctttggcctgattcccttttttgtcttccagctgattaatttaggcataaattttctaacgccaaactttattgtcatggaaaagattgctaatagttctcaagctggtatggtgttactacctggtaccttactcggagctctactagcacctgcttttggtaaactttatgatcaaaaaggagcaagactttcgctttatttaggaaatgccttatttagtttatcattgattattatgacacttcaaacaagacattttatgcttttaccattcactcttttatatattttattcacgtttgggcgtaacatgggctttaataatagcttagccacggctattcgagaattgcctgccgagaaaaatgccgatgccacggccatttttcagatgatgcagcaatttgctggcgctctaggaactgctatggcatcactgatagcaaatagtcaagcagaattcacaagcggtgtccagtctgtctaccttctctttactatttttgctctacttgattttatctttttctttgctatgttttaccatttagggaaaaaaggattagcctaa

SEQ ID NO: 482 - protein, 455 aa, Streptococcus pyogenes
MSHHQQTVSKQTIMAIIAIALIGFSGILSETSMNVTFPTLMSVYQLPLNSLQWMTTIYLLAVAIMMTTSATLKKNVRERPLFFMATGLFTFGTILAVLTQSFAIMLLARIFQGIGTGLVMPQMFNIILERVPMHKVGLFMGFAGLIISLAPAFGPTYGGFMISHFSWQWIFICILPVPLIAGILAYYYLEDSPVSEKVPFDWLAFIALSISLTSALLAITSLENGSVNLYYLGLFILSFILFLYKNLTAKQPFLDIRILKIPSLTFGLIPFFVFQLINLGINFLTPNFIVMEKIANSSQAGMVLLPGTLLGALLAPAFGKLYDQKGARLSLYLGNALFSLSLIIMTLQTRHFMLLPFTLLYILFTFGRNMGFNNSLATAIRELPAEKNADATAIFQMMQQFAGALGTAMASLIANSQAEFTSGVQSVYLLFTIFALLDFIFFFAMFYHLGKKGLA

SEQ ID NO: 483 - DNA, 1095 bp, Streptococcus pyogenes
ttgactcaactaaaaactcaatatccctcgctcatcatagacgctagcttcatcaccttggcggcaaatgcaacggtcaagccccaggataagacctacaataccgtcaatcttctcaacagatttttccttatctggcttgatgttgcctccaggggcttgtcgcatcaccacgttttgtcccatccatttaaggactggatgaccaacatgttagattttccctaccatcatgagtttatagagttccttggacggtggactcatatccttatagccctgcccaaaaggcaccatggtcaagtcgacaccgcaattccaaggtatcttctggtaaccatcagagagaagacagggattgtaaaattaaccactgtgcaaaatacagcgttcactacccagtcgaatcaactcaaaaaacaatacgggcagttcttgttaacagaatctaataactgttgtgcatgcccaggctgtgatagaccactcattctaaccagtggcaacttagcagcagaaaattacgaggtttcagccattgaaaaagataaggacgctgaagcactgaatctgatagccctctgcccagatggttttttaacctatcaagcagataggcgcaaaaaaattgtaacaactctaaaaaatgttaaaaagattctagtctctgcacataacagccaacaagcgatttctgatatgaagttagacagtggaattgtttcagttttgactagtctcaataaactaaaatgtgatgaatataatatctcctatgactcgaagcaattgactgataagatatcacctgagaacaatcgtacgctttatcaattggttaaaaaccaagttattgataactacttaaccattcaaaaaatcatcgtaaatttggacaaacaaggaaaaattgattacgagaaaatccaatatcaaacgcgatcgatgtataaaaagttaaaagcagccaagcataataatctggctattttcaatactatttcggaaaaactccatctggctacactacaggacatctacttctgtcagatgattgtctcttactttatccaaaaatgcgaggtacttgaataa

SEQ ID NO: 484 - protein, 364 aa, Streptococcus pyogenes
MTQLKTQYPSLIIDASFITLAANATVKPQDKTYNTVNLLNRFFLIWLDVASRGLSHHHVLSHPFKDWMTNMLDFPYHHEFIEFLGRWTHILIALPKRHHGQVDTAIPRYLLVTIREKTGIVKLTTVQNTAFTTQSNQLKKQYGQFLLTESNNCCACPGCDRPLILTSGNLAAENYEVSAIEKDKDAEALNLIALCPDGFLTYQADRRKKIVTTLKNVKKILVSAHNSQQAISDMKLDSGIVSVLTSLNKLKCDEYNISYDSKQLTDKISPENNRTLYQLVKNQVIDNYLTIQKIIVNLDKQGKIDYEKIQYQTRSMYKKLKAAKHNNLAIFNTISEKLHLATLQDIYFCQMIVSYFIQKCEVLE

SEQ ID NO: 485 - DNA, 1353 bp, Streptococcus pyogenes
atgactagagatatcattggaaacttatccacatttgaattagcgatccttatcttacttgtttttgttgctttttactttatccatcttgcggtgcgtgattaccgaaatgcacgtattattcggatgatgagccataaaatccgagacttgattaatggtcgctatactgatataatcgacgaaaaagcagacattgagttaatggagctttcagaccagttaaatgacctgtcagatgtttttcgcttgacgcatgaaaatcttgcccaagaaaaaaatcgcttggcaagtattttggcttatatgtcagatggtgtacttgctacagaccggtctggtaaaatcatcatgattaacgagacagctcgcaagcaattaaatttaagtaaagaagaggcactaaagaaaaacattacagatttgttagaaggtgatacttcatatacctaccgtgatttggtatccaaaacaccagtggtaactgttaatagccgaaatgatatgggtgagtttgtctcattacgcttgcgctttgcgttgaataggagagagagtggttttatttcgggcttggttgtggtgctccatgacaccacagaacaggaaaaagaagaacgtgaacgccgtctttttgtctctaatgtaagtcatgaattaaggacccctttaacttcggttaaatcctacttggaggctcttgatgaaggtgcacttaaagaagatattgctccaagtttcataaaagtttctcttgatgaaactaatcggatgatgcgtatgatttcagatcttttaaacctgtctcggattgataatcaagtaacccaattagcagtagagatgactaattttactgcttttataacttctattttaaacagatttgatttggttaaaaatcagcatacaggtacaggaaaagtctatgaaattgtaagagattaccctattacctctgtctggattgaaattgataatgataaaatgacacaggttatcgagaatattttgaacaatgccattaagtattctccagatggtggaaaaattacagtccgtatgaaaacaacagatacccaattaattatttccatttcagaccaaggactaggtatccctaaaacagatttgcctcttatttttgatcggttctatcgtgtagacaaggcaagaagtcgtgcccaaggagggaccggtctaggccttgccattgctaaagaaatcatcaagcagcaccatggctttatctgggctaagagtgactatggtaaaggatcgacctttactattgtcttgccttatgaaaaagatgcagccatctatgaagaatgggaggaagatgtagactaa

SEQ ID NO: 486 - protein, 450 aa, Streptococcus pyogenes
MTRDIIGNLSTFELAILILLVFVAFYFIHLAVRDYRNARIIRMMSHKIRDLINGRYTDIIDEKADIELMELSDQLNDLSDVFRLTHENLAQEKNRLASILAYMSDGVLATDRSGKIIMINETARKQLNLSKEEALKKNITDLLEGDTSYTYRDLVSKTPVVTVNSRNDMGEFVSLRLRFALNRRESGFISGLVVVLHDTTEQEKEERERRLFVSNVSHELRTPLTSVKSYLEALDEGALKEDIAPSFIKVSLDETNRMMRMISDLLNLSRIDNQVTQLAVEMTNFTAFITSILNRFDLVKNQHTGTGKVYEIVRDYPITSVWIEIDNDKMTQVIENILNNAIKYSPDGGKITVRMKTTDTQLIISISDQGLGIPKTDLPLIFDRFYRVDKARSRAQGGTGLGLAIAKEIIKQHHGFIWAKSDYGKGSTFTIVLPYEKDAAIYEEWEEDVD

SEQ ID NO: 487 - DNA, 1335 bp, Streptococcus pyogenes
atgcgtataggtctattcacagatacctattttccacaagtttcaggagtcgctactagtattcgtacgttaaaagaagagctagaaaaagaaggtcacgaagtttatattttcaccactactgatagagatgtcaaacgctttgaagacccgaccattattcgactgccaagtgttccttttgtgtcatttacggatagacgtgtggtttatcgtggcctcatttcgtcatacaaaattgcaaaacactataatcttgatattattcatacgcaaactgagtttagcttaggcttattagggaaaatgataggcaaagctttgcgaattcctgttgtccatacttaccatacccaatatgaggactacgtgagttatattgccaacggaaaaatcattcgaccaagtatggtcaaacctcttcttaggggctatttgaaggatttggatggggttatctgcccaagtaggattgtcctcaatcttctagaaggttacgaagttactatccctaagcgggttatcccaacaggcattcctttggaaaaatatattcgtgatgacatcacagcagaagaagtaaccaacttaaaagcagaattgggcattgctggtgatgaaaccatgttattgagtttgtcacggatttcttatgaaaaaaatattcaagctatcatcaatcagatgccagctattttggctgaaaatgccaagataaagcttattattgtaggaaatggcccctatttgcaagatttgaaacacttggcgatgcagttagaggttgacaaacacgtgacctttacaggcatggtgcctcatgataaggttgctctgtactataaggcttgtgatttctttatctcagcatcaactagtgagactcagggcttgacctatattgaaagtttggctagtggcactcctattattgctcatggcaatccttatttagatgatgtggtgactgataaaatgtttggcactctttattacgctgaaacagatttaactgatgctattattgatgccatactaaaaacaccagttatggataaacggttattagcaaaaaaacgttatgaaatctcagcacagcactttggaaaatctatttacacgttctatttagatacgttaattgctagaaatagcaaagaagctcaaaagctgagtctttatcttaatcattctggtaaaagtagttctctaaaattagtgcaaggtgctattcacttgcctaaacgtgctgctaaggtcacagctatcacctcagtaaaagtagtcaaggctcctatcaagctggtccatgctatcaaagattttctggattaa

SEQ ID NO: 488 - protein, 444 aa, Streptococcus pyogenes
MRIGLFTDTYFPQVSGVATSIRTLKEELEKEGHEVYIFTTTDRDVKRFEDPTIIRLPSVPFVSFTDRRVVYRGLISSYKIAKHYNLDIIHTQTEFSLGLLGKMIGKALRIPVVHTYHTQYEDYVSYIANGKIIRPSMVKPLLRGYLKDLDGVICPSRIVLNLLEGYEVTIPKRVIPTGIPLEKYIRDDITAEEVTNLKAELGIAGDETMLLSLSRISYEKNIQAIINQMPAILAENAKIKLIIVGNGPYLQDLKHLAMQLEVDKHVTFTGMVPHDKVALYYKACDFFISASTSETQGLTYIESLASGTPIIAHGNPYLDDVVTDKMFGTLYYAETDLTDAIIDAILKTPVMDKRLLAKKRYEISAQHFGKSIYTFYLDTLIARNSKEAQKLSLYLNHSGKSSSLKLVQGAIHLPKRAAKVTAITSVKVVKAPIKLVHAIKDFLD

SEQ ID NO: 489 - DNA, 999 bp, Streptococcus pyogenes
atgaaagtcttattgtatttagaagcagaaaattatctaagaaaatcaggaattggtcgagcgattaagcatcaggctaaagccttgtcacttgttggtcaacattttacgactaatccaagagaaacttatgatttggttcatctcaatacctatggtttaaaaagttggctgctgatgataaaagcacaaaaagctggtaagaaggttatcatgcatgggcattctacagaagaagattttagaaattcttttattttttcaaatctattatctccttggtttaaaaaatacctttgtcacttttacaataaggcagatgctatcattacccctaccctatattctaagtctttgattgagagttatggagtgaagtcacctatttttgcagtgtcaaatgggattgatttggagcagtacggagcagatcctaaaaaggaagcagcttttcgtcgctactttgacattaaagagggtgaaaaagtggttatgggagcaggattattttttctgaggaaaggaattgatgactttgtcaaagttgcccaagctatgccagatgttcgttttatctggtttggcgagaccaacaaatgggtcattcctgctcaagttcgccaaatggtcaatggtaaccacccgaaaaatcttattttcccaggatacattaaaggggatgtttatgaaggtgccatgactggtgcagatgcctttttctttccaagtcgtgaagaaacagaaggcattgttgtcttagaagccttggccagtcgccagcaccttgttttacgtgatataccagtttactacggatgggttgatcaaagtagtgcggaattagcaaccgatataccaggttttatagaagctctgaaaaaagtcttttctggtgccagcaacaaagttgaagctggttacaaggttgcccagagtcgtcgcctagaaacggttggccatgccttagtagatgtctataaaaaagtaatggagttataa

SEQ ID NO: 490 - protein, 332 aa, Streptococcus pyogenes
MKVLLYLEAENYLRKSGIGRAIKHQAKALSLVGQHFTTNPRETYDLVHLNTYGLKSWLLMIKAQKAGKKVIMHGHSTEEDFRNSFIFSNLLSPWFKKYLCHFYNKADAIITPTLYSKSLIESYGVKSPIFAVSNGIDLEQYGADPKKEAAFRRYFDIKEGEKVVMGAGLFFLRKGIDDFVKVAQAMPDVRFIWFGETNKWVIPAQVRQMVNGNHPKNLIFPGYIKGDVYEGAMTGADAFFFPSREETEGIVVLEALASRQHLVLRDIPVYYGWVDQSSAELATDIPGFIEALKKVFSGASNKVEAGYKVAQSRRLETVGHALVDVYKKVMEL

SEQ ID NO: 491 - DNA, 987 bp, Streptococcus pyogenes
ttgaaatatctcagcttttgtgttacaattgccctaaaattccatttgaaagaaaagtctatgacactactatctatcattgtcccctgctttaatgaagaagcaaacattctcccttattttgaagaaatgcatcaactagaaacgtccatgaccaaccaacttgcttttgaatacatttttattgatgatggttctaaggataacaccttgggtattttgcgtgagctagctgctcgctttccaaatgtgcattatctgtctttttcacgccattttggcaaggaagctgggctcttagctggactaaaagaagccaaaggcaattacattactgtgatggatgtggatctgcaagatccacccgaacttttgccaattatgtacgctaagctaaaagaaggttatgacatcgttggcaccaggcgccaaaatagacaaggagaaccactaattcgttcaatgtgttcgaatctattttatggactgatcaaacacttatcagatactgaaatggtcaatggagttcgggattatcggttaatgaccagacaagtcgttgatagcattcttgagttgggagaggttaatcgtttttcaaaagggatcttttcgtgggttggttatcgtatcacctatcttagttttgaaaaccaaaaacgcaaatatggaaaaagtcgttggcatttttgggagttgctccgatattctttagatggctttatcaacttttcagaaatgccgttaaccattgctacctggacagggactttcagctttttgatttctattttcgccatcttatttatcattatcagaaagatactctttggtgatcctgtctctggttgggccagcactgtctctattattttattcatgggaggcattcagctcttttgcatgggtattattggaaaatatatttcaaaaatattccttgaaactaaaaaaaggcctctctatattatcaaagaaaaacattaa

SEQ ID NO: 492 - protein, 328 aa, Streptococcus pyogenes
MKYLSFCVTIALKFHLKEKSMTLLSIIVPCFNEEANILPYFEEMHQLETSMTNQLAFEYIFIDDGSKDNTLGILRELAARFPNVHYLSFSRHFGKEAGLLAGLKEAKGNYITVMDVDLQDPPELLPIMYAKLKEGYDIVGTRRQNRQGEPLIRSMCSNLFYGLIKHLSDTEMVNGVRDYRLMTRQVVDSILELGEVNRFSKGIFSWVGYRITYLSFENQKRKYGKSRWHFWELLRYSLDGFINFSEMPLTIATWTGTFSFLISIFAILFIIIRKILFGDPVSGWASTVSIILFMGGIQLFCMGIIGKYISKIFLETKKRPLYIIKEKH

SEQ ID NO: 493 - DNA, 1194 bp, Streptococcus pyogenes
gtgaactggcgacaaaatctaaaagtggcttggcttggtaacttctttactggggcaagcttttcacttgttatgccttttatggctctatatgtggaaaatttaggtactccgacagaattagtagaatactatgctggtctggcagttgctgtgacggcacttgcttcagctttatttgctcctgtttgggggaagttggctgatcgttatggccgaaaacctatgatgctgcgagccagttttgttatgacatttacaatgggtggtttagctattattcctaatgtgttttggttactcattttgagattattaacaggtgtctctgcgggctatgtgccaaatgccactgccttgattgccagccaagccccaaaagaggagtcaggttatgctttaggcacattagcaacaggagtgacagcaggcgctttaattggtcctttactagggggaattttggcagagctattaggaattcgacaagttttcttattagttggtgtgatattatttttatgttctttaatgacagctgtttatgttaaagaagagtttaagccggttaggcgctttgagatgatacctacaaaagtcattttaaaacaggtaaaaagtccccagattatgcttggtttatttgtgactagtatgattattcaaatttcagctcaatcagtggcccccattttatcattgtatattcgtcatcttggtcaaactcacaacttaatgtttacttcaggcctggtagtttcggccatggggttttctagcttatttagcagttcttacttaggaaaattaggagatcgatttggcaatcatcggttattgttagccgctttgtgttatagctttatcatgtattttagcagtgccttagcgcagaccagttttcaattaggagtactacgctttgcttatgggtttggtgtgggcgctttgatgccaagtattaactctttactaactaagttaacaccaaaagaaggtatttctagagtatttgcctataatcaaatgtttagtaaccttggtcaagtcattggcccttttattggatcaaatgtggctgtagtgttaggctaccgttctgttttttatgtgactagtttgattgtgtttgttaatttaatatggagtttgattatatttcgaaaatatattaaagttaaggatattgtgtga

SEQ ID NO: 494 - protein, 397 aa, Streptococcus pyogenes
MNWRQNLKVAWLGNFFTGASFSLVMPFMALYVENLGTPTELVEYYAGLAVAVTALASALFAPVWGKLADRYGRKPMMLRASFVMTFTMGGLAIIPNVFWLLILRLLTGVSAGYVPNATALIASQAPKEESGYALGTLATGVTAGALIGPLLGGILAELLGIRQVFLLVGVILFLCSLMTAVYVKEEFKPVRRFEMIPTKVILKQVKSPQIMLGLFVTSMIIQISAQSVAPILSLYIRHLGQTHNLMFTSGLVVSAMGFSSLFSSSYLGKLGDRFGNHRLLLAALCYSFIMYFSSALAQTSFQLGVLRFAYGFGVGALMPSINSLLTKLTPKEGISRVFAYNQMFSNLGQVIGPFIGSNVAVVLGYRSVFYVTSLIVFVNLIWSLIIFRKYIKVKDIV

SEQ ID NO: 495 - DNA, 855 bp, Streptococcus pyogenes
atgtctatgaaattttttgagggcttgatgtcataccactttttacaaaatgcactgataacggctgtagtcattggtatcgtctcaggtgctgtagggtgttttattatccttaggtcaatgtctcttatgggtgatgccatctcacacgctgttttaccaggggttgctttgtcatttattttaggagtcaatttttttattggagcgattatttttgggttattagcttctgttattattacttatatcaaggaaaactctgtcattaaaggagatacggctattggtatcacctttagctcttttttggcactgggagtcatcttgataggggtagccaatagttcgacggacttatttcatattttgtttgggaatattttagctgtgcaagatagcgataagtggattactattggtgtttcgatttttgttttagtggttattagtctctttttcaaagaactattattaacatcatttgatcctatcttagccaaatcaatgggtgtgaaggtcaatgcgtatcattatttgttgatggtcctattaactttagtggctgttacggcgatgcaaagcgtgggtactatcttgattgttgccttattgattacgccagcagcgacagcttatttatatgctaatagcttaaaagtaatgttagtgatgtcatctttactaggcgctttagcatcggttttagggctttatttgggctatacctttaatgttgccgcagggtcaagtatcgtactgacttctgcgatgatgtttttgatcagtttctttgtttcacccaagcaaggctaccttaaaagatggatgcaaaaaaaagaaaaaacaccttaa

SEQ ID NO: 496 - protein, 284 aa, Streptococcus pyogenes
MSMKFFEGLMSYHFLQNALITAVVIGIVSGAVGCFIILRSMSLMGDAISHAVLPGVALSFILGVNFFIGAIIFGLLASVIITYIKENSVIKGDTAIGITFSSFLALGVILIGVANSSTDLFHILFGNILAVQDSDKWITIGVSIFVLVVISLFFKELLLTSFDPILAKSMGVKVNAYHYLLMVLLTLVAVTAMQSVGTILIVALLITPAATAYLYANSLKVMLVMSSLLGALASVLGLYLGYTFNVAAGSSIVLTSAMMFLISFFVSPKQGYLKRWMQKKEKTP

SEQ ID NO: 497 - DNA, 342 bp, Streptococcus pyogenes
atgacactaaaaaaacactattatcttctcagcctgctagctcttgtaacggttggtgctgcctttaacacaagccagagtgtcagtgcacaagtttatagcaatgaagggtatcaccagcatttgactgatgaaaaatcacacctgcaatatagtaaagacaacgcacaacttcaattgagaaatatccttgacggctaccaaaatgacctagggagacactactctagctattattactacaacctaagaaccgttatgggactatcaagtgagcaagacattgaaaaacactatgaagagcttaagaacaagttacatgatatgtacaatcattattaa

SEQ ID NO: 498 - protein, 113 aa, Streptococcus pyogenes
MTLKKHYYLLSLLALVTVGAAFNTSQSVSAQVYSNEGYHQHLTDEKSHLQYSKDNAQLQLRNILDGYQNDLGRHYSSYYYYNLRTVMGLSSEQDIEKHYEELKNKLHDMYNHY

SEQ ID NO: 499 - DNA, 1383 bp, Streptococcus pyogenes
atgacaaattatgccattattttagcagcgggcaaagggactcgcatgacttctgatctcccaaaagttcttcataaagtatctggactaaccatgcttgagcatgtttttcgtagtgtaaaagcgattagtcctgaaaaatccgtgacggttattggtcacaaatcagaaatggtacgtgctgtcttagcagatcaatcagcctttgtccatcaaacagagcagttaggaactggccatgccgtgatgatggcagaaacacaactagaaggactagaagggcataccttggtgattgcaggagatactcccttgatcactggagaaagcctgaagagtctgattgattttcatgtgaatcataaaaatgtcgccactattttaacagctacggctcaagatccatttggttatggtcgtattgttcgcaacaaagatggcgaagtgatcaagattgttgagcaaaaagacgccaatgagtatgagcaacaattaaaagaaatcaatacaggaacctatgtgtttgataacaagcgtctctttgaagcgctcaaatgcatcactaccaacaatgctcaaggagagtattacctgactgacgttgtggctatttttagagcaaacaaagaaaaggtaggagcctatatcctgagagacttcaatgaaagtctgggagtaaatgatcgtgtggccttagcaatagctgaaacagtgatgcgtcagcgcattacccaaaaacatatggtcaatggggtgactttccaaaatcctgaaactgtttatattgaaagcgatgttgagattgctccagacgtccttatcgaaggaaatgtgaccttaaaagggcgtacacatatcggctcaggaactgtcttgacgaatggtacttatattgtggattctgaaattggtgataactgtgttgttaccaattcgatgatcgaatcatctgttttagctgcaggagttacggttggcccttacgcccaccttcgaccgggaacgaccttagatagggaagtccatatcggtaactttgtcgaggtcaagggttctcacattggtgaaaaaacaaaggctgggcatctgacttatattggaaacgctcaggttgggtcttcagtcaatgttggggctggaaccatcactgtcaactacgacggccaaaacaaatatgaaacagtcattggagatcacgcttttattgggagcaactcgactctcattgcacctttggaagttggggatcacgctttaacagcagcaggttcaacgatttcaaaaacagttcctatcgatagcattgctattggtcgtagccgccaagtcacaaaagaaggttatgccaagcgcctagcgcatcacccaagtcgaagcaaataa

SEQ ID NO: 500 - protein, 460 aa, Streptococcus pyogenes
MTNYAIILAAGKGTRMTSDLPKVLHKVSGLTMLEHVFRSVKAISPEKSVTVIGHKSEMVRAVLADQSAFVHQTEQLGTGHAVMMAETQLEGLEGHTLVIAGDTPLITGESLKSLIDFHVNHKNVATILTATAQDPFGYGRIVRNKDGEVIKIVEQKDANEYEQQLKEINTGTYVFDNKRLFEALKCITTNNAQGEYYLTDVVAIFRANKEKVGAYILRDFNESLGVNDRVALAIAETVMRQRITQKHMVNGVTFQNPETVYIESDVEIAPDVLIEGNVTLKGRTHIGSGTVLTNGTYIVDSEIGDNCVVTNSMIESSVLAAGVTVGPYAHLRPGTTLDREVHIGNFVEVKGSHIGEKTKAGHLTYIGNAQVGSSVNVGAGTITVNYDGQNKYETVIGDHAFIGSNSTLIAPLEVGDHALTAAGSTISKTVPIDSIAIGRSRQVTKEGYAKRLAHHPSRSK

SEQ ID NO: 501 - DNA, 1344 bp, Streptococcus pyogenes
ttgtttatggaagaggattataacaaaagagaacctgagaagtttacgcaatttctgcgccgtcaaaaggtcgtcttttttgtcgcattttttggttatgtgtgtgcttacttggtacgcaacaatttcaaactaatgtcaaacactattatggtgcaaaatggttgggacaaggctcaaattgcgatcttgttatcgtgtttgaccgtttcttatggcttagcaaaattctatatgggagccttaggggatcgtgttagcttgaggaagctcttttcaatcagcttgggtgcaagcgctttgatttgtattttaattggttttttcaatagttcaatggtggtattaggaatactgctagtcttgtgtggtgtcgtacaaggtgccttggcacctgcctcacaagccatgattgccaattattttccaaataaaacacgcggcggagccatcgctggatggaacatttctcaaaacatgggatcagccctcttgccattaaccatcgccttgctcaccagtatgggcttggtggtaccagctaatggcaatattttacttgcctttttaatccctggcgttttagtgttcttgtttgctttgtgttgctggaagcttggcggtgataaccctgagtctgagggacttgactctcttcgaacgatgtatggtgatgcgggcgagtcagctgttgccagtgaagaagaaaagcataacctgtcttattggcaactcatctggaaatacgttttttgtaacccgtcgctcttacttgttgctgctgtcaatgtggccctttattttgttcgttttgggattgaagactggatgccgatctacttgtcacaagtagccaatatgtcagaggctcatatccattttgcgatttcaatgttagagtgggtcgctattccaggctcgctggtatttgcgtggttagcggttcgttatcctaataaaatggccaaggttggggctattgggctttttgtgttagcggctattgtctttgtctatgaacgcttgactgccacaggtgctccaaattatttcttgttgcttgttattgcaggtattttagggtcattgatttatggcccacagttgatcgtgaatattttaacaatcaactttgttcctttaaatgttgcaggaacagcgattggttttgtaggagtaacagcttatctcatcggcaatatgggagcaaactggctgatgccgattttggcagatggttttggctggttttggtcatatattgtcgttgcagccttatctgctttttcagcggttggttatttgattttagccaaacgtgaggaagaaatcatcaaagattag

SEQ ID NO: 502 - protein, 447 aa, Streptococcus pyogenes
MFMEEDYNKREPEKFTQFLRRQKVVFFVAFFGYVCAYLVRNNFKLMSNTIMVQNGWDKAQIAILLSCLTVSYGLAKFYMGALGDRVSLRKLFSISLGASALICILIGFFNSSMVVLGILLVLCGVVQGALAPASQAMIANYFPNKTRGGAIAGWNISQNMGSALLPLTIALLTSMGLVVPANGNILLAFLIPGVLVFLFALCCWKLGGDNPESEGLDSLRTMYGDAGESAVASEEEKHNLSYWQLIWKYVFCNPSLLLVAAVNVALYFVRFGIEDWMPIYLSQVANMSEAHIHFAISMLEWVAIPGSLVFAWLAVRYPNKMAKVGAIGLFVLAAIVFVYERLTATGAPNYFLLLVIAGILGSLIYGPQLIVNILTINFVPLNVAGTAIGFVGVTAYLIGNMGANWLMPILADGFGWFWSYIVVAALSAFSAVGYLILAKREEEIIKD

SEQ ID NO: 503 - DNA, 615 bp, Streptococcus pyogenes
atgaaaaaaacattaaccttgctactggcactctttgccatcggggtaactagtagcgtcagagcggaggatgaacagaataagtttatacttgatggattacaggaaaaagtaaaagaagttagtgtatcagatttttctgttggagaatctaaaatcaaagtctggcttcctcaagcttggtcggtcaaaatttctagagaacattcaccaaaatcaagcatttctaattctggagaacaaaaacctttaagcaatagctcagagaataaagaaggtcaattttctaaaagattaccttatggtacccaacatactattaaattatcatcccaacttacaaaaggtgagagagtcactttgacattcagagatgaagatttttggggagcaggttactgcttctatagagattcactatccataaaagaagacaaacaatacgaagaagaaattaagaaaattgaggatgacctagagagacaagatcttgaaaatgatgcactagagatgtttaaaaaacaaaccgaaagagaggctaataaaccttggcatcagcggttaagcgaaaacatccaagatcagtggtggaactttaagggactgtttcagtga

SEQ ID NO: 504 - protein, 204 aa, Streptococcus pyogenes
MKKTLTLLLALFAIGVTSSVRAEDEQNKFILDGLQEKVKEVSVSDFSVGESKIKVWLPQAWSVKISREHSPKSSISNSGEQKPLSNSSENKEGQFSKRLPYGTQHTIKLSSQLTKGERVTLTFRDEDFWGAGYCFYRDSLSIKEDKQYEEEIKKIEDDLERQDLENDALEMFKKQTEREANKPWHQRLSENIQDQWWNFKGLFQ

SEQ ID NO: 505 - DNA, 321 bp, Streptococcus pyogenes
atgaaaaaaacactattattaagtactgctgttttgacgctagccggtactgtcgccctattaactcattctgtagatgcatcgacttattcttactacagcactagtcattttttaagacaagatggaagagagactcttagagaagctaaatatgcggcagagttacaaattagaaacttgttaagtcagtatcatattaatggaaaagaatataataattatttcagatattattatagacaagctatgcaagctagaaatatagacgaagttaataaaatcattgaagatttagaaaaaaacttgcaagcacaataa

SEQ ID NO: 506 - protein, 106 aa, Streptococcus pyogenes
MKKTLLLSTAVLTLAGTVALLTHSVDASTYSYYSTSHFLRQDGRETLREAKYAAELQIRNLLSQYHINGKEYNNYFRYYYRQAMQARNIDEVNKIIEDLEKNLQAQ

SEQ ID NO: 507 - DNA, 633 bp, Streptococcus pyogenes
atgaaaaagacattaactttgctactggcactctttgccatcggggtaactagtagcgtcagagcggaggatgaacaaagtagtacacaaaagccagtaaaatttgatttggatggacctcaacaaaaaattaaagattatagtggcaacacaatcactctagaagacttatatgttggtagtaaagtagtaaaaatatatatccctcaaggatggtgggtatatctttacagacaatgtgatcataacagtaaagaacgaggaattttagctagtcctattctcgaaaaaaatataacaaaaacagatccttatcgtcaatattatacaggagtaccttatattcttaacttaggagaagatcctttgaagaaaggagaaaaattaactttctcatttaaaggagaagacggattttatgtcggtagctatatctatagagactctgatactataaaaaaagaaaaagaagctgaagaagcacttcaaaaaaaggaagaggaaaagcaacaaaaacagctagaagaaagcatgctaaagcagataagagaagaagaccataaaccttggcatcagcggttaagtgagagcatccaagatcagtggtggaactttaagggactgtttcagtga

SEQ ID NO: 508 - protein, 210 aa, Streptococcus pyogenes
MKKTLTLLLALFAIGVTSSVRAEDEQSSTQKPVKFDLDGPQQKIKDYSGNTITLEDLYVGSKVVKIYIPQGWWVYLYRQCDHNSKERGILASPILEKNITKTDPYRQYYTGVPYILNLGEDPLKKGEKLTFSFKGEDGFYVGSYIYRDSDTIKKEKEAEEALQKKEEEKQQKQLEESMLKQIREEDHKPWHQRLSESIQDQWWNFKGLFQ

SEQ ID NO: 509 - DNA, 384 bp, Streptococcus pyogenes
gtgttgagcagtcccactgttttaaaacaattttctgctataattgggataatccctttagtagtcaggccacctctgataggggtggcttttttgggttttagtgacccgtgtgttgagaaaggagcatttatgccagaaaagaaagtgttgcccgtcctaagcatagtggtgagttttgtctgcctgcttgatcatatcttcttttttgctacttatagttatctctacttaccgcttgtagcaagtagtctagctcttatcggtctggtgcaaaacaaaggcaggcaaaaggtgtggtcgctagctggactcgtcctagctgctctagccgtggcagtagtggcctatgcctactatgacccaaccgtcatcccctactaa

SEQ ID NO: 510 - protein, 127 aa, Streptococcus pyogenes
MLSSPTVLKQFSAIIGIIPLVVRPPLIGVAFLGFSDPCVEKGAFMPEKKVLPVLSIVVSFVCLLDHIFFFATYSYLYLPLVASSLALIGLVQNKGRQKVWSLAGLVLAALAVAVVAYAYYDPTVIPY

SEQ ID NO: 511 - DNA, 555 bp, Streptococcus pyogenes
atgaaatggagtggttttatgaaaacaaaatcaaaacgctttttaaacctagcaaccctttgcttggccctactaggaacaactttgctaatggcacatcccgtacaggcggaggtgatatcaaaaagagactatatgactcgcttcgggttaggcgatttagaagatgattcagctaactatccttcaaatttagaagctagatataaaggatatttagagggatatgaaaaaggcttaaaaggagatgatatacccgaacggcccaagattcaggttcctgaggatgttcagccatctgaccatggcgactatagagatggttatgaggaaggatttggagaaggacaacataaacgtgatccattagaaacagaagcagaagatgattctcaaggaggacgtcaagaaggacgtcaaggacatcaagaaggagcagattctagtgatttgaacgttgaagaaagcgacggtttgtctgttattgatgaagtagttggagtaatttatcaagcatttagtactatttggacatacttaagcggtttgttctaa

SEQ ID NO: 512 - protein, 184 aa, Streptococcus pyogenes
MKWSGFMKTKSKRFLNLATLCLALLGTTLLMAHPVQAEVISKRDYMTRFGLGDLEDDSANYPSNLEARYKGYLEGYEKGLKGDDIPERPKIQVPEDVQPSDHGDYRDGYEEGFGEGQHKRDPLETEAEDDSQGGRQEGRQGHQEGADSSDLNVEESDGLSVIDEVVGVIYQAFSTIWTYLSGLF

SEQ ID NO: 513 - DNA, 1635 bp, Streptococcus pyogenes
atgtcgacagaaaaaaaacaactgacacaagaagaattgatggttcagggagcagcctggtccacagctggtaatttcattagccgacttttgggagtgttatacattattccctggtacatttggatggggcaatacgcgattcaagccaacgctcttttcaatatggggtataatgtttatgcttattttttattgatttcaaccacaggactcaatgttgcgattgctaagcaggttgccaagtacaattccatgggacaaactgagcatagctatcaattaatccgaagtaccctaaaactcatgcttggtctgggccttattttttcagccattatgtatctgggctctcctttatttgcgagcttatctggtggtgatgacacacttgttcccattatgcacagcctttctttagcagtttttatttttcctgtaatgagtgtgattcgaggcatctttcaaggccacaataatatcaagccttatgcagttagtcagattgctgagcaactcattcgggttatctggatgcttttgaccaccttttttatcatgaagttgggttctggtgattacgcttcagcagtgactcagtcaacttttgcagcctttatcgggatggtggctagtatgggtgttctggggtactatctttggaaacagggacttctagcagctatttttagtaagccagatcatactgtttctattgatatcaagggcttgttgcttgaaaccttaaaagaatccatcccctttatcgtaacaggaagtgccattcaagcctttcaattgattgatcaatggacttttgtcaatacgatgactctttttacagattatagccgttctcaattgcttgttttatttggttactttaacgcaaacccagccaaaattacaatggtcttaattgcagtagcagcatctattggtggtgtaggtattgccttgttaactgaaaattatgtcaaaaaagacatgaaagcagctgctcgtttaatcattaacaacattgaaatgttagtgatgtttttgttacctgctcttactggggcaattattttagcaagacctctatattctgttttttacggagctagcgaggagcgtgccattcacctctttgtggcggttctctttcaaaccttgctactggcgctttacaccctcttttcaccgatgcttcaagctctttttgaaaatcgaaaagcgatttactactttgcctatggtatcttgattaagttagttttacagataccgcttatttatttgctacatgcttatggtcctttactagcgacgacgattgctttagtggtgccgatttatttgatgtatcgacgcctatatcaggttactcattttaaccgcaaactgttgcaaaaacgtttattattaaccttaattgaaaccttattaatgggactggtcgtgtttgtggccaactggctattgggctatgcctttaaaccgacaggccgcttgaccagccttctttacctcctcattattggtggcttgggaatgacggtttacacggcactcaccttgctgacgcatcaactggataaattaattggtagcaaagctagtcgccttcgtcagaaattaggctggcattaa

SEQ ID NO: 514 - protein, 544 aa, Streptococcus pyogenes
MSTEKKQLTQEELMVQGAAWSTAGNFISRLLGVLYIIPWYIWMGQYAIQANALFNMGYNVYAYFLLISTTGLNVAIAKQVAKYNSMGQTEHSYQLIRSTLKLMLGLGLIFSAIMYLGSPLFASLSGGDDTLVPIMHSLSLAVFIFPVMSVIRGIFQGHNNIKPYAVSQIAEQLIRVIWMLLTTFFIMKLGSGDYASAVTQSTFAAFIGMVASMGVLGYYLWKQGLLAAIFSKPDHTVSIDIKGLLLETLKESIPFIVTGSAIQAFQLIDQWTFVNTMTLFTDYSRSQLLVLFGYFNANPAKITMVLIAVAASIGGVGIALLTENYVKKDMKAAARLIINNIEMLVMFLLPALTGAIILARPLYSVFYGASEERAIHLFVAVLFQTLLLALYTLFSPMLQALFENRKAIYYFAYGILIKLVLQIPLIYLLHAYGPLLATTIALVVPIYLMYRRLYQVTHFNRKLLQKRLLLTLIETLLMGLVVFVANWLLGYAFKPTGRLTSLLYLLIIGGLGMTVYTALTLLTHQLDKLIGSKASRLRQKLGWH

SEQ ID NO: 515 - DNA, 1053 bp, Streptococcus pyogenes
gtgaaaactaagcatccctttttgtgtctcgagcgtttttgcttaaaaaaaacgcagataatcactaagtcacatatcttttggcttgtctttgtgctacttagttttagcttatgtgttgctatttactgtcatctgcgctttggagccgttgctttatcacatcaggatcttaactctattttatttggaaagcaaaacggccataaagccaatgttttactcgctatacgattaccgagactttttggtgctaccttaactggctctgcgttagctgtttctggaactatcatgcaagcaatcacacgtaatcctatcgctgagcctggccttttaggcattaatgctggagcaggactagccttggtactggcttatgcgtttgtacctcacttgcactattccctcattattctgctttcgttgttagggtctagcctggcagcaaccttagtctttggcctttcttatcaatctggcaaaggctaccatcagctccgccttgtcttagcaggagctatggtttccatactgctatcagcattaggtcaaggtattaccaattactatcatctggcaaatgctgttatcggctggcaagcaggaggtcttgtcggggtcaattggcaaatgatcggctatattgctcctcttattattcttagtctttgtttagcccagctattatcttatcacctgaccgtccttagtctaagtgagtctcaggcaaaagctcttgggcaaaaaaccaacttgatcagtgcagtctttatgattttggttcttattttatcatcagcagctgtagccattgctggaagcatttcttttatcggcttagtcattcctcatcttatgaaacattttacacctcatcattaccgataccttttgccgctttgtgcagtttctggcgctagtttcatggtatgggttgatattgcttgtcgtaatctcaatccgccttatgaaacccctcttggggcattggttagcttaattggttttccatgctttttatggttaataagaagaggaggccgctattga

SEQ ID NO: 516 - protein, 350 aa, Streptococcus pyogenes
MKTKHPFLCLERFCLKKTQIITKSHIFWLVFVLLSFSLCVAIYCHLRFGAVALSHQDLNSILFGKQNGHKANVLLAIRLPRLFGATLTGSALAVSGTIMQAITRNPIAEPGLLGINAGAGLALVLAYAFVPHLHYSLIILLSLLGSSLAATLVFGLSYQSGKGYHQLRLVLAGAMVSILLSALGQGITNYYHLANAVIGWQAGGLVGVNWQMIGYIAPLIILSLCLAQLLSYHLTVLSLSESQAKALGQKTNLISAVFMILVLILSSAAVAIAGSISFIGLVIPHLMKHFTPHHYRYLLPLCAVSGASFMVWVDIACRNLNPPYETPLGALVSLIGFPCFLWLIRRGGRY

SEQ ID NO: 517 - DNA, 1038 bp, Streptococcus pyogenes
atgctttttatggttaataagaagaggaggccgctattgaaatctcaaagacaccttttaaggttatatactagcctgatcctgctacttgtaagtcttatgggattagctttgtcccttggagaatctcatctatcttttttggaccttgtccatgtgtttttgggaaaatctagccatgccatatctttcatcgttattaacattcgtctgccaagaattctagctgcttgtctaggaggcggttctcttgctttatcagggctattattacaacgtttaacacgaaatcccttagctgactctggtgtattaggtattactataggagcaggtatctctttggctattgtggtctccttttctttctttgagcaagctcatatcagccattacttgcctttatttgccatgcttggtgctattgtaacaacctttagcgtttattggctatctttgacaaaacaaggacaaattgatcctacacggttaattcttactggtgtagctgttactaccatgctttcaagtctaatggttgctcttgttggtcatattaatcgctacaaagtcgatttggtcatcaattggcttagcggccaattaataggagacgactggcctactctgagtgtcatcgctcctttgttattgtgtttttggctattgacttatagtcaagcccatttccttaatattatgggattagctgataatactgctattgggctaggactccctttaaaccgtaagcgtcgtttgatacttgtcttagcagctggcttaggtgctttgagtgttcttttggttggtaatattagttttatcggcttaatagctggacactttagtacatacttggtagggagtaatcataaaataacaatacccattagtattttaatcggaatgatcctacttcttgttgcagatacagtaggacgagtctatctggttggcagtaatatccagacagggattttagtgtcgcttatcggagccccttattttctttacttaatggcaaaaacaaaataa

SEQ ID NO: 518 - protein, 345 aa, Streptococcus pyogenes
MLFMVNKKRRPLLKSQRHLLRLYTSLILLLVSLMGLALSLGESHLSFLDLVHVFLGKSSHAISFIVINIRLPRILAACLGGGSLALSGLLLQRLTRNPLADSGVLGITIGAGISLAIVVSFSFFEQAHISHYLPLFAMLGAIVTTFSVYWLSLTKQGQIDPTRLILTGVAVTTMLSSLMVALVGHINRYKVDLVINWLSGQLIGDDWPTLSVIAPLLLCFWLLTYSQAHFLNIMGLADNTAIGLGLPLNRKRRLILVLAAGLGALSVLLVGNISFIGLIAGHFSTYLVGSNHKITIPISILIGMILLLVADTVGRVYLVGSNIQTGILVSLIGAPYFLYLMAKTK

SEQ ID NO: 519 - DNA, 1374 bp, Streptococcus pyogenes
atgaagtcactatattatttttttaggagttacattaacatggaagaccctgtgagtcagtccttagtgattcaatttttattgttagttgttttaaccttgttaaatgcttttttttcagccagtgaaatggccttagtttctctcaatcgttctcgggtggaacaaaaagcagcagacggtgataaaaaatacgctcgtttgttgcgggttttagaggaacctaatcattttttatcaacgattcaagttgggattacctttattagtttactatcaggagcaagtttatcagcttctttgggtaaggtgatctcaggttggctaggtaattcagcgaccgcaaggacagctggtactatcatctccttggttttcttgacttatgtctctattgttttaggagaattgtatccaaaacggattgccatgaacctcaaagacaagttggcgattgtttcagcccctattatcattgggttagggagactggttagtccctttgtatggctcttatcagcttctactaatttactgagccgacttacccctatgacctttgatgatgcagatgagcaaatgacacgtgatgaaatcgagtatatgttatcaaaaagtgaggcgacccttgatgctgaagaaattgagatgttgcaaggagttttctcacttgatgaaatgatggcgcgtgaagtcatggtcccaaggaccgatgctttcatgattgacattaacgatgatccgcttgaaaatattcaggaaatcttaaaacaaagtttttcacgcattcctgtttatgatgtggataaagataaaattatcggtctcatccacactaagcgtctcttggagtcaggtttccgccagggatttgatcagattaacatgcgaaaaatgttacaagaacctctttttgttcccgaaaccatttttgtagatgatctcttacgccagctgcgcaatacccaaaatcagatggctattttgctagatgaatatggtggtgtggcaggacttgtgactttggaagacttgcttgaagaaatcgtcggtgaaatcgatgatgaaaccgataaagcagaacaatttgttcatgagattggagacaatacctatattgttgttggtactatgactttaaatgagtttaatgactattttgataccgaactagaatcagatgatgtagataccattgctggtttttatttgacaggtatcggaaccattccaagccaggagcaaaaagaagcctacgaaatagataacaaagacaaacatttagttctaatcaacgataaagtcaaagatggccgtattacgaaattaaaattaatcctgtctaatatagaacagattattgaggaagactag

SEQ ID NO: 520 - protein, 457 aa, Streptococcus pyogenes
MKSLYYFFRSYINMEDPVSQSLVIQFLLLVVLTLLNAFFSASEMALVSLNRSRVEQKAADGDKKYARLLRVLEEPNHFLSTIQVGITFISLLSGASLSASLGKVISGWLGNSATARTAGTIISLVFLTYVSIVLGELYPKRIAMNLKDKLAIVSAPIIIGLGRLVSPFVWLLSASTNLLSRLTPMTFDDADEQMTRDEIEYMLSKSEATLDAEEIEMLQGVFSLDEMMAREVMVPRTDAFMIDINDDPLENIQEILKQSFSRIPVYDVDKDKIIGLIHTKRLLESGFRQGFDQINMRKMLQEPLFVPETIFVDDLLRQLRNTQNQMAILLDEYGGVAGLVTLEDLLEEIVGEIDDETDKAEQFVHEIGDNTYIVVGTMTLNEFNDYFDTELESDDVDTIAGFYLTGIGTIPSQEQKEAYEIDNKDKHLVLINDKVKDGRITKLKLILSNIEQIIEED

SEQ ID NO: 521 - DNA, 564 bp, Streptococcus pyogenes
atgtcaaaaacacataaaatgattatgattggtatactttctgcgatatcatttctattgatgctagttagctttgccattattccaggcgcagcttttttaaaaattgaatttagtattattcctgttttatttggtttaatgattatggacttaaagagtgcttacttaattttgttattgaggtccttattgaaactctttttgaacaatcgtggggttaatgattttattggtctcccaatgaatattatcgctatcgctttatttgtgacggcttttgccttagtttggaaccgtcaaaaaacgcttagtcaatatgtatttgctagcttactaggcacagggttattaacgtttggcatggttgttcttaattatacttttgccattcctttatatgctatatttgcaaatattgatatcagagcttatattggtgttactaagtatatgatgactatggttattccgtttaatcttgttgaagggttgatatttgcaattaccttttattttgtgtatattgcaagtaaaccaattttagaaagatacttacactaa

SEQ ID NO: 522 - protein, 187 aa, Streptococcus pyogenes
MSKTHKMIMIGILSAISFLLMLVSFAIIPGAAFLKIEFSIIPVLFGLMIMDLKSAYLILLLRSLLKLFLNNRGVNDFIGLPMNIIAIALFVTAFALVWNRQKTLSQYVFASLLGTGLLTFGMVVLNYTFAIPLYAIFANIDIRAYIGVTKYMMTMVIPFNLVEGLIFAITFYFVYIASKPILERYLH

SEQ ID NO: 523 - DNA, 375 bp, Streptococcus pyogenes
atgtctaacatatcattaatcatgattgccatacggtcagcctcatgcgctgttgctgtcaagctttcttcaagaatatcactgtcatctttaccccaacgttgtaagagaccaatatgccctttaataatcgcaaccggtgttcgtaattcatggctgacatcactaataaaacgtgattgcaacttagtatgtgtctccaatttgtctaacatattgtcaaagataacagacaattcttcgatttcatctcctgacgaaatatctgagcgcaggtttaaattattaggattttcagagatattacgcatcacttcatgtaaattgtgtaaaggcttcaaaaagcgccgcgtagtaattaagatgattaaatag

SEQ ID NO: 524 - protein, 124 aa, Streptococcus pyogenes
MSNISLIMIAIRSASCAVAVKLSSRISLSSLPQRCKRPICPLIIATGVRNSWLTSLIKRDCNLVCVSNLSNILSKITDNSSISSPDEISERRFKLLGFSEILRITSCKLCKGFKKRRVVIKMIK

SEQ ID NO: 525 - DNA, 1503 bp, Streptococcus pyogenes
atggaaaatcagaaacaaaaacagaagaaatataaaaattcgttaccaaaacgactatctaatatcttttttgttctttttttctgcattttctctgcctttacactgattgcctatagttcaacaaactatttcttattgaagaaagaaaagcagtcagtctttcaagctgtaaatattgttagagttcgtctttctgaggtggactctaattttacattagagaacttagcagaagttttgtacaaaaacgataaaacacatctgagaattgatgacagaaagggcagtcgagtcattaggagtgagcgcgatatcacaaatactctagatgcgaatcaagatatttatgtctataacattgataaacagatgatttttaccacagataacgaagaatcatctcctggcttgcatggtcctatcggtcgtgtgtatcacgaccatatcgaagatcagtatcgtgggttttccatgacacaaaaggtatattctaatcggactggaaaatttgtgggctatgttcaagtctttcatgatttaggcaattattatgtcattagagcaagactgctgttttggctactagttgttgagttatttggcacaagcttagcctatttaatcatcttaattactacgcggcgctttttgaagcctttacacaatttacatgaagtgatgcgtaatatctctgaaaatcctaataatttaaacctgcgctcagatatttcgtcaggagatgaaatcgaagaattgtctgttatctttgacaatatgttagacaaattggagacacatactaagttgcaatcacgttttattagtgatgtcagccatgaattacgaacaccggttgcgattattaaagggcatattggtctcttacaacgttggggtaaagatgacagtgatattcttgaagaaagcttgacagcaacagcgcatgaggctgaccgtatggcaatcatgattaatgatatgttagacatgattcgcgtacaaggctcatttgagggacatcaaaatgatatgacagttttggaagattctattgaaactgttgttggtaattttagagttttaagagaagattttatctttacatggcagtcagaaaatccaaaaacgatagcccgtatttataaaaatcattttgagcaggctttgatgattctgattgacaatgctgtgaagtattcccgtaaagaaaagaaaatcgcgattaacctttcagtgactggcaaacaagaagctattgttagagttcaagataaaggcgaaggaatttctaaagaagatattgaacatatctttgaacgcttttatagaacggataaatcacgtaatcgaacaagtacccaggctggattagggattggcttgtctattctcaagcaaattgtagatgggtatcatttacagatgaaggttgaaagtgaattaaatgaaggttcagtgtttatcttacatattcctttggcccagtctaaagagagttag

SEQ ID NO: 526 - protein, 500 aa, Streptococcus pyogenes
MENQKQKQKKYKNSLPKRLSNIFFVLFFCIFSAFTLIAYSSTNYFLLKKEKQSVFQAVNIVRVRLSEVDSNFTLENLAEVLYKNDKTHLRIDDRKGSRVIRSERDITNTLDANQDIYVYNIDKQMIFTTDNEESSPGLHGPIGRVYHDHIEDQYRGFSMTQKVYSNRTGKFVGYVQVFHDLGNYYVIRARLLFWLLVVELFGTSLAYLIILITTRRFLKPLHNLHEVMRNISENPNNLNLRSDISSGDEIEELSVIFDNMLDKLETHTKLQSRFISDVSHELRTPVAIIKGHIGLLQRWGKDDSDILEESLTATAHEADRMAIMINDMLDMIRVQGSFEGHQNDMTVLEDSIETVVGNFRVLREDFIFTWQSENPKTIARIYKNHFEQALMILIDNAVKYSRKEKKIAINLSVTGKQEAIVRVQDKGEGISKEDIEHIFERFYRTDKSRNRTSTQAGLGIGLSILKQIVDGYHLQMKVESELNEGSVFILHIPLAQSKES

SEQ ID NO: 527 - DNA, 297 bp, Streptococcus pyogenes
  Unsure (3)..(3): unsure
ttntgtcgttattatctttgctttttagcgcccctagtagcaagtttgattcagttggctatttctcgtcaaagagaatatctagctgatgctagttctgttgaactaacaagaaatccccaaggtatgattaaggctcttgaaaaattgcagttatctcagccaatgaagcatcctgttgatgatgctagtgcggccttgtatattaatgagcctcgcaaaaaaaggagcttcagttcattattcagcacccatcctcctattgaggagaggattgaaaggttaaaaaacatgtga

SEQ ID NO: 528 - protein, 98 aa, Streptococcus pyogenes
MCRYYLCFLAPLVASLIQLAISRQREYLADASSVELTRNPQGMIKALEKLQLSQPMKHPVDDASAALYINEPRKKRSFSSLFSTHPPIEERIERLKNM

SEQ ID NO: 529 - DNA, 630 bp, Streptococcus pyogenes
  Unsure (41)..(41): unsure
atgctttatcaacagatttcacaaaataagcaacgaacagntgttttattagttggtttcttcgctctcttagcacttattggagcttcagcaggctatctgctgttagataattatgccatgggcttggtccttgctcttgtcattggggtgatttatgctaccagtatgatttttcaatccaccagtcttgtaatgagtatgaacaatgctagagaagttacagaaaaagaggctccaggctttttccatattgtcgaggatatggctatggtggcccagattccgatgccgagagtttttattattgaagatccttctttaaatgcttttgcgacaggatctagccctcaaaatgctgctgttgcagcaacgacaggtttacttgaagtcatgaatcgtgaagaacttgaaggtgttatcggccatgaaattagccacatccgaaattatgatatccgtatttcgactattgctgtagctttggcgagtgctgttaccgttatttctagtatcggtgggcgtatgctatggtatggtggcggttctcgcaggcaaagagatgacggagatgatgatgttttaagaatcattacattactttntgtcgttattatctttgctttttag

SEQ ID NO: 530 - protein, 209 aa, Streptococcus pyogenes
  UNSURE (14)..(14): unsure
MLYQQISQNKQRTXVLLVGFFALLALIGASAGYLLLDNYAMGLVLALVIGVIYATSMIFQSTSLVMSMNNAREVTEKEAPGFFHIVEDMAMVAQIPMPRVFIIEDPSLNAFATGSSPQNAAVAATTGLLEVMNREELEGVIGHEISHIRNYDIRISTIAVALASAVTVISSIGGRMLWYGGGSRRQRDDGDDDVLRIITLLXVVIIFAF

SEQ ID NO: 531 - DNA, 558 bp, Streptococcus pyogenes
atgccaacagttttgattatcttagtcgttttaggagtgcttgcgctatggttaatgattagttacaatagcctggttaaatctcggatgcacacaaaagaagcttggagtcagattgatgtgcaattaaagcgtcgtaatgacttgattccaaatcttattgaaaccgtaaagggatatgctagctacgagcaaaagacatttgaaaaaatcactgatttgcgtgcgcgtgttgcgaatgcctcaactcctcaagaaaccatggcggcttctaacgaattgagtaaacaagtgaccagtttgtttgccgttgctgaaaattacccagacttaaaagctaacgaaaacttcttgaaattacaagaagagttgaccaatacggaaaataaaatctcatattctcgtcaactctataattcaacaacgtctaattacaaccttcaattagaatctttcccaagcaatatcgctggtaaattatttggttttaaaccaagtgaattcttacaaacaccagaagctgaaaaagaagttccaaaagttgaatttaacttttaa

SEQ ID NO: 532 - protein, 185 aa, Streptococcus pyogenes
MPTVLIILVVLGVLALWLMISYNSLVKSRMHTKEAWSQIDVQLKRRNDLIPNLIETVKGYASYEQKTFEKITDLRARVANASTPQETMAASNELSKQVTSLFAVAENYPDLKANENFLKLQEELTNTENKISYSRQLYNSTTSNYNLQLESFPSNIAGKLFGFKPSEFLQTPEAEKEVPKVEFNF

SEQ ID NO: 533 - DNA, 1215 bp, Streptococcus pyogenes
atgaaaaaaatatatgatttatgggttagggttagtctaatcaaaaaaataggtatcggtgttgtaataggagtcatgttgggcattttggctcctgatcttacaggttttagtattttaggaaagttatttgttggtggtttaaaggctatcgcacctttgcttgtatttgctttggtttcccaagctatctcccatcagaaaaaagggaaacagactaatatgacattaatcattgttctgtatttatttggtacctttgcgtcagctttagtagcagtactgacagcttatctattccctttgacgttagtgttaaatacacctgtaaatacagaattatcaccacctcaaggtgttgctgaagtttttcagtcacttctattaaaattagtggataatccgatcaatgctttagctactgccaattatattggtgtgctatcatgggcaattatttttggactagcattaaaggctgcaagtaaagaaacaaagcatcttataaaaacagcggcagaagttacttcacaaatagttgtttggatcatcaatctggcacctattgggattatgagtctggtgttcactacgatttctgaaaacggtgttggaatcttatctgattatgcttttttgatactagttttagtaggaacaatgctttttgtcgccttagtggttaatccacttattgcggttttgattacacgacaaaatccttatccccttgtcttgagatgtttacgtgagtcaggtcttacagcatttttcacacgaagttctgcagccaatattccagtcaatatgcaattatgccaaaaaattggattgagtaaagatacttattcagtgtcaattccacttggagcaactattaatatgggtggggcagcaattaccatcaatgtcctaacgcttgctgctgtacacacttttggtattcctattgattttctaacagccctcttacttagcgttgttgctgctgtctctgcttgtggtgcttctggtgttgctgggggatcgttgttacttattcctgtagcatgtagtttgtttggcatttcaaatgatcttgcgatgcaggtggttggtgttggttttattgttggtgttatccaggattcttgtgagacagccttaaattcgtcaaccgatgttctttttacagctattgctgaaaatgctttttggaaacgtaaaaaagcatag

SEQ ID NO: 534 - protein, 404 aa, Streptococcus pyogenes
MKKIYDLWVRVSLIKKIGIGVVIGVMLGILAPDLTGFSILGKLFVGGLKAIAPLLVFALVSQAISHQKKGKQTNMTLIIVLYLFGTFASALVAVLTAYLFPLTLVLNTPVNTELSPPQGVAEVFQSLLLKLVDNPINALATANYIGVLSWAIIFGLALKAASKETKHLIKTAAEVTSQIVVWIINLAPIGIMSLVFTTISENGVGILSDYAFLILVLVGTMLFVALVVNPLIAVLITRQNPYPLVLRCLRESGLTAFFTRSSAANIPVNMQLCQKIGLSKDTYSVSIPLGATINMGGAAITINVLTLAAVHTFGIPIDFLTALLLSVVAAVSACGASGVAGGSLLLIPVACSLFGISNDLAMQVVGVGFIVGVIQDSCETALNSSTDVLFTAIAENAFWKRKKA

SEQ ID NO: 535 - DNA, 1371 bp, Streptococcus pyogenes
atgaaacaaaaaaatgtatatatcgtcattggattcatgctatttgcgctattttttggagcagcaaacctcatttacccagcttttttaggcatctactcaggtcatcagattctatggtctatcattggtttttgtttaactggtgtctccttgcctttactcggtgtcattgctgttgctaaatctggatcaggcgatgttgaaagtttggcacgccccatctctaaatggtatgcaatcttctattcttccattttgtatttatctattggcccattttttgctattccaagaacaggagccacttctttttcagtcggtatcgctcctatcttaggagataatacaaccaataaagctatttatgctatactattttttggtctgtcctacttccttgctatcaaacctagtaaactagctgaaaatatcggaaaatttttaacgccaacgttgttagttgttatttctattttggttatcgcgtcctttgtccatcctgctggaaattacggtgatgcttttaacgctggggtcggtgttaataatgcctttaaagattttccttttatagcaggattaattcaaggttatggcactatggatgcactagcttctcttgtttttgctattttagtcattgaggctaccaaacaatttggcgctaagacggacaaagaaatgaccaaaataacacttatttctggggctattgccattttgctattagcacttgtctatatctttgtcggtcgtattggagcaacatcacaatcattatttccttttattgatggcagctttacccttcatggtaatccagttaatggcggtcaaatcttaagtcatgcttctcgtttttacctaggtggcatcggacaagcatttctagctgttgtgattttcctggcctgtctaaccacttcaacaggcttaatcacgtcaagtgctgaatacttccataaattagtgcctgctttatctcatattgcttgggcaactatctttactttactatcagctttcttttattttggtggcttatcagtcattatcaactggtcagctcctgttttattccttttatacccattaacagtcgatttaattttccttgttttggcacaaaaatgcttcaataatgatcctattgtctatcgaactacaattggtctaacctttattcctgccatatttgatgcactcctaacactatcacaaatgactggattatttcatttaccagaagccgttgtaacttttttccaaaaaactgttccactagggcaattctcaatgggatggattatctttgctgctattggttttttaatagggcttatactaagtaaaacgaagaaaagctaa

SEQ ID NO: 536 - protein, 456 aa, Streptococcus pyogenes
MKQKNVYIVIGFMLFALFFGAANLIYPAFLGIYSGHQILWSIIGFCLTGVSLPLLGVIAVAKSGSGDVESLARPISKWYAIFYSSILYLSIGPFFAIPRTGATSFSVGIAPILGDNTTNKAIYAILFFGLSYFLAIKPSKLAENIGKFLTPTLLVVISILVIASFVHPAGNYGDAFNAGVGVNNAFKDFPFIAGLIQGYGTMDALASLVFAILVIEATKQFGAKTDKEMTKITLISGAIAILLLALVYIFVGRIGATSQSLFPFIDGSFTLHGNPVNGGQILSHASRFYLGGIGQAFLAVVIFLACLTTSTGLITSSAEYFHKLVPALSHIAWATIFTLLSAFFYFGGLSVIINWSAPVLFLLYPLTVDLIFLVLAQKCFNNDPIVYRTTIGLTFIPAIFDALLTLSQMTGLFHLPEAVVTFFQKTVPLGQFSMGWIIFAAIGFLIGLILSKTKKS

SEQ ID NO: 537 - DNA, 663 bp, Streptococcus pyogenes
atgtttatgaactcggatggtcatggagatgcaggttggggcttagcgatttggaatactttatacatgaccattgtgccttttattgttgggggggctattggtctcttattaggcttgttattagttttaacaggaccggacggtgttattgaaaacaaaacgatttgttgggttattgataaagttacctctatttttagagccattccttttgttattttgattgctattttagctagctttacctatttgcttttaagaacaactttaggagcaacagcggccttggtacctttaacctttgcgacttttcctttttatgcccgtcaggtccaagttgttttttcagaattagacaagggtgttattgaagcagcacaagcttcaggtgctactttctgggatattgtcaaagtgtatctcagtgaaggtttaccagatcttattcgtgtttctacagtcaccttaatttctttagttggggaaactgccatggcaggagctatcggtgctggaggattaggaaatgtagcgatttcttatggttataatcgttttaacaatgatgtgacttgggtagcgactattattattcttttaattatttttgctatccaatttattggtgatagcttgactagaaggtttagtcataaataa

SEQ ID NO: 538 - protein, 220 aa, Streptococcus pyogenes
MFMNSDGHGDAGWGLAIWNTLYMTIVPFIVGGAIGLLLGLLLVLTGPDGVIENKTICWVIDKVTSIFRAIPFVILIAILASFTYLLLRTTLGATAALVPLTFATFPFYARQVQVVFSELDKGVIEAAQASGATFWDIVKVYLSEGLPDLIRVSTVTLISLVGETAMAGAIGAGGLGNVAISYGYNRFNNDVTWVATIIILLIIFAIQFIGDSLTRRFSHK

SEQ ID NO: 539 - DNA, 927 bp, Streptococcus pyogenes
atggaatcgattgataaatctaaatttcgatttgttgagcgcgatagtgaagcctccgaagtgattgatacccctgcttattcttactggaaatcagtgtttcgtcagtttttttctaaaaaatctacagtctttatgctcgtaattttagtgacagtcttgatgatgagctttatttatccaatgtttgccaactacgactttaatgacgttagtaatatcaatgacttttcaaagcgttatatttggccaaatgcagagtactggtttggaaccgacaaaaatgggcaatctctgtttgatggtgtttggtatggggcacgtaattctattttaatctcagttatagcgacactaattaatatcaccattggggtagtgttaggagccatatggggagtttctaaagcatttgataaagttatgattgaaatttataacattatctcaaatatcccttctatgcttattatcattgttttgacctattcattaggtgcaggattttggaatttgattctagctttctgtatcactggatggattggtgtcgcctactccatccgtgttcaaatcttgcgttaccgtgatttagaatacaaccttgctagtcaaactttgggaacaccaatgtacaagattgctgttaagaacctcctgcctcaattggtttcagttatcatgactatgttgtcacaaatgctaccagtttatgtatcttctgaggccttcttatccttctttgggattggtttaccaaccaccactccaagtttaggacgttttattgctaattattcaagcaacttaacaacaaatgcctacctcttttggattcccttagtaacattgattttagtatcgttaccactatacattgtcggacaaaacttggctgatgccagtgacccacgttcacatagatag

SEQ ID NO: 540 - protein, 308 aa, Streptococcus pyogenes
MESIDKSKFRFVERDSEASEVIDTPAYSYWKSVFRQFFSKKSTVFMLVILVTVLMMSFIYPMFANYDFNDVSNINDFSKRYIWPNAEYWFGTDKNGQSLFDGVWYGARNSILISVIATLINITIGVVLGAIWGVSKAFDKVMIEIYNIISNIPSMLIIIVLTYSLGAGFWNLILAFCITGWIGVAYSIRVQILRYRDLEYNLASQTLGTPMYKIAVKNLLPQLVSVIMTMLSQMLPVYVSSEAFLSFFGIGLPTTTPSLGRFIANYSSNLTTNAYLFWIPLVTLILVSLPLYIVGQNLADASDPRSHR

SEQ ID NO: 541 - DNA, 1182 bp, Streptococcus pyogenes
ttgaccaaaagaattatactaactatttttacctttatttgcttttcggtgatgcctcttgtccacgccgaagatgtcatggatattacaaggcaagcaggctacacagttagtgaggttaatcgaccaaaatcttctattgtcgttgatgcaaatagttcagatattctttggcaagataatattgatattcctagggatcctgctagtatgtctaagatgtttacgctttacattttatttgaagagctcgctaagggaaaaattacgatggacactactattacggcaactccaaccgatcaagctatcgctaacatttatgagattagcaataataatatcgtcgctggagtagcttatcctattcgtgatcttattactatgacagctgtgccttcatcaaatgcagcaactgttatgattgccaattatttatcaaacaatgatgcttctgcgtttatcgatcgtgttaatgccacagccaaacaattaggcatgactaacactcatttttcaaacgctagtggtgcagcagcacaagcttttcaaggttattataatcctactaaatatgatttatctgcttcaaatattacgaccgctcgagatttgtccaagttactctatgccttcttaaaaaaataccctgaaattatctcctttacaaataaatctgttgtgcacactatggtaggaacgccatatgaagaagaatttcacacctataaccactctctcccagataatcaatttggtatgaaaggagttgatggattaaaaacaggttctagtcccagtgctgcttttaacgccatgataactgccaaaagaggcaaaactcgactcattactattgtcatgggggtcggagattggtcagatcaaaacggggagttttatagacatcctttcgtcaatgccttgactgagaaagggtttaaagatagtaagaccttatccaaaaaagcacgccaaaaactcgaaaaattagtgccacaaaccaaaaaagaaacatcatctaaacagcagcacttcaaagccactaaaaagcaatcgtacttggaaagagtcgaagattttatgaatcacaaccacactttcttgcttatttgcttagctatctttataattactatccttttactaagcctcgttgtctttgcaatgggacgccaataa

SEQ ID NO: 542 - protein, 393 aa, Streptococcus pyogenes
MTKRIILTIFTFICFSVMPLVHAEDVMDITRQAGYTVSEVNRPKSSIVVDANSSDILWQDNIDIPRDPASMSKMFTLYILFEELAKGKITMDTTITATPTDQAIANIYEISNNNIVAGVAYPIRDLITMTAVPSSNAATVMIANYLSNNDASAFIDRVNATAKQLGMTNTHFSNASGAAAQAFQGYYNPTKYDLSASNITTARDLSKLLYAFLKKYPEIISFTNKSVVHTMVGTPYEEEFHTYNHSLPDNQFGMKGVDGLKTGSSPSAAFNAMITAKRGKTRLITIVMGVGDWSDQNGEFYRHPFVNALTEKGFKDSKTLSKKARQKLEKLVPQTKKETSSKQQHFKATKKQSYLERVEDFMNHNHTFLLICLAIFIITILLLSLVVFAMGRQ

SEQ ID NO: 543 - DNA, 1170 bp, Streptococcus pyogenes
atgttttcattcacaatagattatgtccttgttctgataggggctttgttaatgtccttattcttaacccctcttgttcgctttttagcctttcgtgtgggtgcagtagacaatcccaatgccagacgggtcaataaggttccgatgccaaccagtggtggattagctatttttatgtcttttttagtagcaagtttgggacttattccgattgcttctaaaggcgccatgttttttggtcagacctacttcagttatattttacctgtcgtgattggtgctacagtaattacccttactggttttttagatgatttgtatgagttaagtcctaaattaaagatgtttggtattctaattggtgcagtgattgtctgggcttttaccgactttaaatttgatagcttcaaaattccttttggagggccgttgttagtttttggtcctttcttaaccttattcttaacagtcctgtggattgtttccatcactaatgctattaacttgattgacggtttggatggtttggttagtggggtctctattattagtttagtgaccatggctattgtatcttatttctttttacctcaaaaggatttctttttgacgttaaccattttggtcttgatttctgctattgcaggattttttccttataattaccatccagctatgatttatttgggtgacacaggagccctctttattggctttatgataggggttttgtctcttcaaggattgaaaaattcaacggctgtggctgtggtgacacctgttattattcttggtgtacccattatggataccatcgtggctattattcgacgtagtttatcaggtcaaaaattctacgagccggataagatgcacctgcatcatcgactcttatcaatgggctttactcatcgaggagctgtcttagtagtttatggtattaccatgcttttttcccttatttctttacttttaaatgtttctagtcgaattggtggcgtcctcttgatgcttggacttttatttggtttagaagtttttattgaaggattggagatctggggtgaaaagcgaacgcctttgtttaacttgttaaagtttattggtaatagtgattatcgtcaagcaatgcttctgaaatggaaagaaaagaaggatttgaaacactaa

SEQ ID NO: 544 - protein, 389 aa, Streptococcus pyogenes
MFSFTIDYVLVLIGALLMSLFLTPLVRFLAFRVGAVDNPNARRVNKVPMPTSGGLAIFMSFLVASLGLIPIASKGAMFFGQTYFSYILPVVIGATVITLTGFLDDLYELSPKLKMFGILIGAVIVWAFTDFKFDSFKIPFGGPLLVFGPFLTLFLTVLWIVSITNAINLIDGLDGLVSGVSIISLVTMAIVSYFFLPQKDFFLTLTILVLISAIAGFFPYNYHPAMIYLGDTGALFIGFMIGVLSLQGLKNSTAVAVVTPVIILGVPIMDTIVAIIRRSLSGQKFYEPDKMHLHHRLLSMGFTHRGAVLVVYGITMLFSLISLLLNVSSRIGGVLLMLGLLFGLEVFIEGLEIWGEKRTPLFNLLKFIGNSDYRQAMLLKWKEKKDLKH

SEQ ID NO: 545 - DNA, 1899 bp, Streptococcus pyogenes
atgaaaaaaattttgatgacgcttgtgctctgcttcagtcttttagggatacgaataaaagcagctgatgtagactatagcatcaccaactatgaaggtcagttactgttatcaaaagaaaatactgctcggtttgagcaaaaagtaacctatcaatttgacacttcttataacggccagtatatttcgctgggccggacaggtcatttgccagcgggctttgctattgaccaaaagcctaaagttgaggtatatcagaatggtcaacaggtacctgttagtcaagagtttagtgaccttggagatggctatcgtttaaaactttataatgctggccaagctggtgataaggttgacgtcaaggttatctggcaactgcaccaccttttaacagcttatcaagacgtggcagagctgaattggacaccgattagtgattgggacaaaacattagaaaaggtgagtttgaccgtcactaccccaactgatattcaggattctaatctatgggctcacagaggatattaccaaaagaaacctcaagtgttaaaagaaggtaacagtcgctatcagattaatgccaagaatgtctcagggcaactggaattgcatgcttattgggataaaaaagcattattgggaaaagagccagttgatgtttcaacgagtaaaaagaataaaattgtagcgttagaaactaagatttccagacgaaggaccttgttacagctgctatttggcaaagtcattcctctggtagaggtaggttttcttctttggcagttaatacagtttacaagattaaagaaacaattcaatcgttatcatttggctaaccatacagatcacagttacgaagtccctgaagatctttcgcctcttgtgttgacacaagcgatttatggacagagttttgcctatttatcccctacagcatcagaaagccagaaattattgatccctaaaggagtgacctttgaggcccttgttcaagctaccttgttggatctgatcgaccaaaaggtgcttttattaacgaaagaagaagggaaagcttatcttgaaatcagtcagttagatcgtgtgacagatgaggaagctgccttcttagatatggcttttggaaacaaggtgacattgccggtggatcaattgtttagtcaataccattatgatgctgataccattaaacaattaaagaaaacgtacaaaggtaaaaagctcgagcaagaagtccgtcaatcgtctgagcaggtgattaaggcgatgaaaaaagcgtcggcagctattacaaacaatgtcctagaaactatcaaaaagttaaacttaccagatacttatcgtcaaatgaccccggcagagaaacgaaaaagcaatagtgtccagggattaggttgtttgttgcttattctaaatagtggtttattgatttacttggctattaaagaaagtgggttagccctcatttaccttgctttaatggtgctaacgatgtgccttggcttttacattagcctgaagttagatcaatacaagaaattgggtattgaaacacctgaggggggtgttcggttacatcaatggcagagctttaaaaacatgatacgagacattgacaaatttgaggatgttgctattgaaggtttggttgtttggaaccgtgttttggtttatgccaccttatttggttacgctaagaaagtggaacgctatttgaaagtccatcgtattgccttacctgaggtttaccaagctgttcgaccaggtgaattatcaatggtaatgtatgctacgacaccaacctttgtgtctagcttgtcttcagctacaacttcctcaaatttctcagtctcttccggaggcgggattagtggtggtggcggcggcggtgccttttaa

SEQ ID NO: 546 - protein, 632 aa, Streptococcus pyogenes
MKKILMTLVLCFSLLGIRIKAADVDYSITNYEGQLLLSKENTARFEQKVTYQFDTSYNGQYISLGRTGHLPAGFAIDQKPKVEVYQNGQQVPVSQEFSDLGDGYRLKLYNAGQAGDKVDVKVIWQLHHLLTAYQDVAELNWTPISDWDKTLEKVSLTVTTPTDIQDSNLWAHRGYYQKKPQVLKEGNSRYQINAKNVSGQLELHAYWDKKALLGKEPVDVSTSKKNKIVALETKISRRRTLLQLLFGKVIPLVEVGFLLWQLIQFTRLKKQFNRYHLANHTDHSYEVPEDLSPLVLTQAIYGQSFAYLSPTASESQKLLIPKGVTFEALVQATLLDLIDQKVLLLTKEEGKAYLEISQLDRVTDEEAAFLDMAFGNKVTLPVDQLFSQYHYDADTIKQLKKTYKGKKLEQEVRQSSEQVIKAMKKASAAITNNVLETIKKLNLPDTYRQMTPAEKRKSNSVQGLGCLLLILNSGLLIYLAIKESGLALIYLALMVLTMCLGFYISLKLDQYKKLGIETPEGGVRLHQWQSFKNMIRDIDKFEDVAIEGLVVWNRVLVYATLFGYAKKVERYLKVHRIALPEVYQAVRPGELSMVMYATTPTFVSSLSSATTSSNFSVSSGGGISGGGGGGAF

SEQ ID NO: 547 - DNA, 1587 bp, Streptococcus pyogenes
ttgaaacaggagacctatatgaaaaagctaatccttagctgtttggtcgccttggcccttctgtttggaggaatgagccgggctcaagcaaaccaatatttaagagtcggaatggaagcagcctatgctccttttaactggactcaagatgacgcttcaaacggggctgttccaattgaaggaactagccaatacgccaacggttacgatgtccaagtcgctaaaaaagtcgctaaagctatgaacaaagaacttttagtcgttaagacctcttggaccggtttaattccagcattaacttctggaaaaatcgatatgatcgctgctggtatgagtcctaccaaagagcgtagaaacgaaattagcttctcaaacagctactacactagccaccatgttctagtcgtaactgccaatggcaaatatgctgatgcaacaagcctcaaggatttttctggagctaaagtaactgcccagcaaggcgtttggcatgtcaatctcttaactcaactaaaaggtgctaagttacaaacaccaatgggagatttctctcaaatgcgacaagcccttacttcgggtgttatcgatgcctatatttctgaacgacctgaagccatgactgctgaagctgctgatagccgtttgaaaatgatcactcttaaaaaagggtttgctgttgctgaatcagatgctgctatcgctgtcggaatgaaaaaaaatgacgatcgtatggcaactgtcaaccaagtgcttgaaggattttctcaaacagatcgtatggccctgatggatgatatggttaccaaacaacccgtggaaaagaaagccgaagatgctaaagcatcatttctaggccaaatgtgggctatttttaaaggtaactggaagcaattcttacgtggaactggaatgacccttctgatttccatggtcggaaccattacaggtctctttattggattattaatcggtattttccgtacagctcctaaagctaagcataaagtagctgccttgggacaaaaactctttggttggttactcactatttatatcgaaatcttccgtgggacacctatgattgttcaatctatggttatctactacggaacagcgcaagcctttggtatttcgatcgaccgtaccctagcggctatttttatcgtatctatcaatacgggggcctatatgagtgaaattgttcgcgggggtattttcgctgtcgacaaaggtcaattcaaagcagcaactgctcttggctttactcacggacaaaccatgcgtaaaatcgtgctaccacaagttgttcgaaacattttaccagcaacaggtaatgagtttgtcatcaatatcaaagatacttctgtcttgaatgttatctctgttgtggaactttacttctcaggtaataccgtagccacacaaacctaccaatatttccaaacctttacgattatcgccattatctactttgttcttaccttcacggtgacacgtatccttcgttatattgaacgccgtttcgatgccgatacttacaccactggagcaaaccaaatgcagattgcggaggtctcaaatgtctaa

SEQ ID NO: 548 - protein, 528 aa, Streptococcus pyogenes
MKQETYMKKLILSCLVALALLFGGMSRAQANQYLRVGMEAAYAPFNWTQDDASNGAVPIEGTSQYANGYDVQVAKKVAKAMNKELLVVKTSWTGLIPALTSGKIDMIAAGMSPTKERRNEISFSNSYYTSHHVLVVTANGKYADATSLKDFSGAKVTAQQGVWHVNLLTQLKGAKLQTPMGDFSQMRQALTSGVIDAYISERPEAMTAEAADSRLKMITLKKGFAVAESDAAIAVGMKKNDDRMATVNQVLEGFSQTDRMALMDDMVTKQPVEKKAEDAKASFLGQMWAIFKGNWKQFLRGTGMTLLISMVGTITGLFIGLLIGIFRTAPKAKHKVAALGQKLFGWLLTIYIEIFRGTPMIVQSMVIYYGTAQAFGISIDRTLAAIFIVSINTGAYMSEIVRGGIFAVDKGQFKAATALGFTHGQTMRKIVLPQVVRNILPATGNEFVINIKDTSVLNVISVVELYFSGNTVATQTYQYFQTFTIIAIIYFVLTFTVTRILRYIERRFDADTYTTGANQMQIAEVSNV

SEQ ID NO: 549 - DNA, 1038 bp, Streptococcus pyogenes
ttgattttcataaggaggaaatcactaatggtagttaaagttggtattaacggtttcggtcgtatcggacgtcttgcattccgccgtattcaaaacatcgaaggtgttgaagtaactcgtatcaatgaccttacagatccaaatatgcttgcacacttgttgaaatacgatacaactcaaggtcgttttgatggaacagttgaagttaaagaaggtggatttgaagtaaacggaaacttcatcaaagtttctgctgaacgtgatccagaaaacatcgactgggcaactgatggggttgaaatcgttcttgaagcaactggtttctttgctaaaaaagaagcagctgaaaaacacttacatgctaacggtgctaaaaaagttgttatcacagctcctggtggaaacgatgttaaaacagttgttttcaacactaaccacgacattcttgacggtactgaaacagttatctcaggtgcttcatgtactacaaactgtttagctcctatggctaaagctcttcacgatgcattcggtattcaaaaaggtcttatgactacaatccacgcttacactggtgaccaaatgatccttgacggaccacaccgtggtggtgaccttcgtcgtgcacgcgctggtgctgcaaatatcgttcctaactcaactggtgctgctaaagctatcggtcttgttatcccagaacttaacggtaaacttgacggtgctgcacaacgtgttcctgttccaactggatcagtaactgagttggttgtaactcttgacaaaaacgtttctgttgacgaaatcaacgctgctatgaaagctgcttcaaacgatagcttcggttacactgaagatccaatcgtttcttcagatatcgtaggcgtatcatacggttcattgtttgacgcaactcaaactaaagtaatggaagttgacggatcacaattggttaaagttgtatcatggtatgacaacgaaatgtcttacactgctcaacttgtacgtactcttgagtacttcgcaaaaattgctaaataa

SEQ ID NO: 550 - protein, 345 aa, Streptococcus pyogenes
MIFIRRKSLMVVKVGINGFGRIGRLAFRRIQNIEGVEVTRINDLTDPNMLAHLLKYDTTQGRFDGTVEVKEGGFEVNGNFIKVSAERDPENIDWATDGVEIVLEATGFFAKKEAAEKHLHANGAKKVVITAPGGNDVKTVVFNTNHDILDGTETVISGASCTTNCLAPMAKALHDAFGIQKGLMTTIHAYTGDQMILDGPHRGGDLRRARAGAANIVPNSTGAAKAIGLVIPELNGKLDGAAQRVPVPTGSVTELVVTLDKNVSVDEINAAMKAASNDSFGYTEDPIVSSDIVGVSYGSLFDATQTKVMEVDGSQLVKVVSWYDNEMSYTAQLVRTLEYFAKIAK

SEQ ID NO: 551 - DNA, 663 bp, Streptococcus pyogenes
ttgacatcgaaaaaacagggacttttacactctctcttcaagcttgatagtaaatggatgagggctagcgcagcactgtttgatttgctcgtgtttaatctcttatttgtcttgtcctgccttccccttctaacgattggggttgctaaaatggctttgtatgcgagtttgttggattggcgagaaggtcaagttagtcagcttgttactacttatagctctcattttaaatattactttaaaagtgggctacgccttggccttattgagcttgggataatgactatttgtctcttagatcttttcttaattcgaaaccaatcaggcctagtttttcaagggtttaaagtactttgcgttgctgttttatttttggtggttatactctttttgtacgcttatcctcaggccgtcaaaagagacctttccctatctacgctgtttaagcgaagctttttattagcaggactcttttttccatggagttttgctttcttggcttttatttgtctcacgatatttagcctacaattgtctctgttaacgttatttggaggcgtgtctttgctagctatcatcggcatcagtagtctaacttatctctacttgattatcatggaatctcttcttaggcgattcccacttaataatgacattgaataa

SEQ ID NO: 552 - protein, 220 aa, Streptococcus pyogenes
MTSKKQGLLHSLFKLDSKWMRASAALFDLLVFNLLFVLSCLPLLTIGVAKMALYASLLDWREGQVSQLVTTYSSHFKYYFKSGLRLGLIELGIMTICLLDLFLIRNQSGLVFQGFKVLCVAVLFLVVILFLYAYPQAVKRDLSLSTLFKRSFLLAGLFFPWSFAFLAFICLTIFSLQLSLLTLFGGVSLLAIIGISSLTYLYLIIMESLLRRFPLNNDIE

SEQ ID NO: 553 - DNA, 831 bp, Streptococcus pyogenes
atgacgaaaaagaaactaaccgcatcagatatcttaaccactgtgatgctatgtgttttgaccattttgtttatttttccattttattggattatgacaggagcatttaaggctcaagccgataccattatgattccaccgcaatggtggccaaaggcgcctactattgaaaattttaaggccttggtagtgcaaaatccagccttaaaatggttgtggaatagtgtctttatttcggtggcgaccatgttcttggtttgtggaacctcctcgttggctggctatgctttggccaaaaagcggttttatggacagcggcttttgttttcgatttttattgctgctatggccttgccaaaacaggttgttctagtgcctcttgtgcggattgttaattttatgggaatccatgacactttggcggctgttattttgcctcttgtgggctggccatttggtgttttccttatgaaacagttctcagaaaatattccaaccgagttattggaatccgccaagattgatggatgtggcgaaattcgtacctttttcaatgtggctttccctattgtcaaaccaggctttgcagcgctagcgatttttacctttatcaatacttggaatgattattttatgcagttagtgatgttaacctctcgagaaaatttaacgatttcacttggggttgccactatgcaagctgaaatggctactaattatggcttgattatggcaggggctgccatggctgcagtgcctattgtaacagtctttcttgtcttccaaaaatcatttacccaaggcattactatgggtgctgtgaaaggttag

SEQ ID NO: 554 - protein, 276 aa, Streptococcus pyogenes
MTKKKLTASDILTTVMLCVLTILFIFPFYWIMTGAFKAQADTIMIPPQWWPKAPTIENFKALVVQNPALKWLWNSVFISVATMFLVCGTSSLAGYALAKKRFYGQRLLFSIFIAAMALPKQVVLVPLVRIVNFMGIHDTLAAVILPLVGWPFGVFLMKQFSENIPTELLESAKIDGCGEIRTFFNVAFPIVKPGFAALAIFTFINTWNDYFMQLVMLTSRENLTISLGVATMQAEMATNYGLIMAGAAMAAVPIVTVFLVFQKSFTQGITMGAVKG

SEQ ID NO: 555 - DNA, 990 bp, Streptococcus pyogenes
gtgttcctaacaagtggcttcttttcaatgcacatgtcaaatggtcactggaaagaagcttttctttttagaaaagttgaacagaaaaaagaggtatttcaagtgaacgtcaataaattaaaaatgagagagacgctcatctcatacgctttcttagctccggtcttggttttctttgtgatttttgtcttgataccgatgattatgggctttgtgacgagctttttcaattattccatgacagagtttacctttgttggttttgctaattatgctaggatgtttcaagatcccattttcatgaagtctcttattaacaccttgattattgttattggttcggtacctgttgtagttttcttttccctctttgtggcggctaaaacctacgacaaaaatgtagtggcgcgttcgttttaccgggcagttttctttctgcctgttgttaccggaagtgttgcggtgacggtggtttggaaatggatctatgatccaatgtcagggattttgaattatgtcttaaaatatgctcatgtgattgaacaaaatattagttggctgggagataagcactgggctttgttggctattattgttattttattaaccacatctgttgggcagcctattattctatatattgctgctatgggaaatattgataactctttggtagaagctgcgcgtgtggacggcgccacagaatttcaggtgttttggaatatcaagtggccaagtctgctgccaacaaccttatatattgctgtcataacaaccattaattccttccaatgttttgctttgattcaacttttgacgtctggagggccaaattattcaaccagtaccctcatgtactatttgtatgaaaaggcctttaagctctctgaatacggctatgccaacacaatgggtgtattcttggcagtcatgattgcaatcatcagctttgctcaatttaaaattttaggtaatgatgtggaatattag

SEQ ID NO: 556 - protein, 329 aa, Streptococcus pyogenes
MFLTSGFFSMHMSNGHWKEAFLFRKVEQKKEVFQVNVNKLKMRETLISYAFLAPVLVFFVIFVLIPMIMGFVTSFFNYSMTEFTFVGFANYARMFQDPIFMKSLINTLIIVIGSVPVVVFFSLFVAAKTYDKNVVARSFYRAVFFLPVVTGSVAVTVVWKWIYDPMSGILNYVLKYAHVIEQNISWLGDKHWALLAIIVILLTTSVGQPIILYIAAMGNIDNSLVEAARVDGATEFQVFWNIKWPSLLPTTLYIAVITTINSFQCFALIQLLTSGGPNYSTSTLMYYLYEKAFKLSEYGYANTMGVFLAVMIAIISFAQFKILGNDVEY

SEQ ID NO: 557 - DNA, 1347 bp, Streptococcus pyogenes
atggctaatagcgaatatatgtttttattattatcaattattgtctattatatgacaaaaatttatattttttcctttctatctgatatcacattaccagtttggaaacaactaacgattttggctttagccctatttttcaatcagttcccgtatttgtcgccattgctaattgatcctctattatttttagttgttttaaggcaagaaaccaagcaattattttctttgaaagctctttttttggctgttgcacctagtgttttggtggatttgctatctcgatttatgggtacaatcgttatcccctatctttttttgtcgagtggtatttatctgggtcatattatctttgacttgcttgcttatctgctgatttttccaagttttgctattattaattatatgattggaaaagattacaagatgatatgccaatccggatattcgaaacgatcgcataatttctatcaaacattgctgatgtttgttttggtttattatgtggacatttttgtcattttaggatttacggacccctttttacattttcatcattctctttttgttcccacaccttataagttattgtttttgatgtttatacttcttttagtttatcttctatcttattttaatcatagttctaaagaataccttaaaaatgagttgagaagagaacaacaagcttatatgactaacttagagatttatgggaaacatcttgagaaactctatcgagatgtaagagcttttcaaagtgattacctgagccgtatagagcgtttaggtcaagccattaagagtgaatccattactcagattcaagatatttatgcccaaacggttcatgaagctaacgactactgggatgataaacactataatatctcgaagcttaggaaaattaatatctcatcgattaagagcttattgtcagctaaaattatcagtgcggaaaaatcaggtattgatttgaatgtggaagtgccagataatataaaagaaacttacattcctgagttggacttactattgttgatgtctattttttgtgataacgccattgaggcagctcttgaagcacaacaacctcatatgtcaattgcttactttttgttaggtgactatcagatgtttgttgtgacaaatacgactaaaaaaaaggtagacattaacaagatctttgaagaaggctattcttcaaaaggttcagaacgtggtatcggcctttctaatgcgcagcgtattctcaaaaagtatccttatttatccttgcggactaaaagttttgataaggaatttagccaaaccttgaccatgccaaaggaggaggtggatagatga

SEQ ID NO: 558 - protein, 448 aa, Streptococcus pyogenes
MANSEYMFLLLSIIVYYMTKIYIFSFLSDITLPVWKQLTILALALFFNQFPYLSPLLIDPLLFLVVLRQETKQLFSLKALFLAVAPSVLVDLLSRFMGTIVIPYLFLSSGIYLGHIIFDLLAYLLIFPSFAIINYMIGKDYKMICQSGYSKRSHNFYQTLLMFVLVYYVDIFVILGFTDPFLHFHHSLFVPTPYKLLFLMFILLLVYLLSYFNHSSKEYLKNELRREQQAYMTNLEIYGKHLEKLYRDVRAFQSDYLSRIERLGQAIKSESITQIQDIYAQTVHEANDYWDDKHYNISKLRKINISSIKSLLSAKIISAEKSGIDLNVEVPDNIKETYIPELDLLLLMSIFCDNAIEAALEAQQPHMSIAYFLLGDYQMFVVTNTTKKKVDINKIFEEGYSSKGSERGIGLSNAQRILKKYPYLSLRTKSFDKEFSQTLTMPKEEVDR

SEQ ID NO: 559 - DNA, 906 bp, Streptococcus pyogenes
gtgctgatgaccaaagtcagaaaagctattattcccgcagcaggtttaggcacacgttttttacctgcaaccaaggcccttgccaaggagatgctacctattgttgataaaccaactattcaatttatcgttgaagaagctctaaaatcaggtatcgaagaaattcttatcgttactggaaaatccaaacgctccatagaagatcattttgattctaattttgaattagaatataatttacaggctaaaggaaaaatcgaacttctaaagttagtagacgagaccacttctattaatcttcactttattcgacagagtcatccaagaggattaggagacgcagttcttcaagcaaagacctttgttggcaatgaaccttttgttgtcatgctaggtgatgatctgatggatattacaaatccaaatgtaaaaccattaaccaaacaattgatcgatgactatgaagaaactcatgctgcaactattgccgtcatgagggttcctcacgaggatgtctctaactacggtatcattgctcctcaagcaaaagcagtaaaaggactctatagtgtggatacttttgttgaaaaaccacaacctcaagatgcacctagtgatttggcaattattggacgttacttgctcacaccagaaatttttagtattttagaaaaacaagaacctggtgcaggcaatgaagttcaactgactgatgctattgataccctcaataagacacagcgtgtctttgctcgtgagtttaaagggaaacgctatgatgttggcgataaatttgggtttatgaaaacttctttggattatgccctgaaacaccctcaagtcaaagatgacttgaaagcctacatcatccaactgggcaaagcactagagaagacaaaaccataa

SEQ ID NO: 560 - protein, 301 aa, Streptococcus pyogenes
MLMTKVRKAIIPAAGLGTRFLPATKALAKEMLPIVDKPTIQFIVEEALKSGIEEILIVTGKSKRSIEDHFDSNFELEYNLQAKGKIELLKLVDETTSINLHFIRQSHPRGLGDAVLQAKTFVGNEPFVVMLGDDLMDITNPNVKPLTKQLIDDYEETHAATIAVMRVPHEDVSNYGIIAPQAKAVKGLYSVDTFVEKPQPQDAPSDLAIIGRYLLTPEIFSILEKQEPGAGNEVQLTDAIDTLNKTQRVFAREFKGKRYDVGDKFGFMKTSLDYALKHPQVKDDLKAYIIQLGKALEKTKP

SEQ ID NO: 561 - DNA, 705 bp, Streptococcus pyogenes
atgaaaacaaacattttgacaattatcatattatcatgtgtttttagctatggaagtcaattagcttatgcagatgaaaatttaaaagatttaaaaagaagtttaagatttgcctataatattaccccatgcgattatgaaaatgtagaaattgcatttgttactacaaatagcatacatattaatactaaacaaaaaagatcggaatgtattctttatgttgattctattgtatctttaggcattactgatcagtttataaaaggggataaggtcgatgtttttggtctcccttataatttttccccaccttatgtagataatatttatggtggtattgtaaaacattcgaatcaaggaaataaatcattacagtttgtaggaattttaaatcaagatgggaaagaaacttatttgccctctgaggctgttcgcataaaaaagaaacagtttactttacaggaatttgattttaaaataagaaaatttctaatggaaaaatacaatatctatgattcggaatcgcgttatacatcggggagccttttccttgctactaaagatagtaaacattatgaagttgatttatttaataaggatgataagcttttaagtcgagacagtttctttaaaaggtataaagataataagatttttaatagtgaagaaattagtcattttgatatctacttaaaaacgcactag

SEQ ID NO: 562 - protein, 234 aa, Streptococcus pyogenes
MKTNILTIIILSCVFSYGSQLAYADENLKDLKRSLRFAYNITPCDYENVEIAFVTTNSIHINTKQKRSECILYVDSIVSLGITDQFIKGDKVDVFGLPYNFSPPYVDNIYGGIVKHSNQGNKSLQFVGILNQDGKETYLPSEAVRIKKKQFTLQEFDFKIRKFLMEKYNIYDSESRYTSGSLFLATKDSKHYEVDLFNKDDKLLSRDSFFKRYKDNKIFNSEEISHFDIYLKTH

SEQ ID NO: 563 - DNA, 1311 bp, Streptococcus pyogenes
atgattcatttaataataattagcgccattgctctagccattggaattggttaccgcaccaaaatcaatattggcctgctggctattgctttttcttacctcatcgcaaccactctcatgggattaagccccaaagaacttcttcatttttggccaacctcactcttttttaccatttttagcgtctctctcttttataacgttgcaacaactaacggcactcttgatgttttggctcaacacattctctaccgcacacgcacccaccctaacgccctctacatgattttatacctgatagcaacccttttgtctgctttaggtgctggatttttcactactatggccgtttgctgtcctctagcgattaccctctgtcaaaaagcggacaaacaccctttgattggagctcaagccgtcaattggggagcttcaggaggggctaatttgataaccagtggctcaggcattgtctttcaaggcctgtttaagcaaatgggatgggaagagcaagctttttcacttggcaatcatatctttatcgtcagcattatctacccactcatcgtcttgcttttattatcttgttacatccgctacagtaagggaagaacaaactcatccttgactattgaccaaccaccagtcctcagcaaggtccaaagacaaaccaccttgctcatgatcagcagcatggttttggtttggctttttcccttgttgcttctcattttcccaaacatcgcatggatagctacttatcgacaaacatttgatattggctttgtctcaatactcatggtctgcctcgccttaaggctcaaattagggaagcaagaagccattttggctaaggttccctgggctataattatcatgctctgcggtatgagcttactaatgtctctagcggtcaagtcaggtttagttacactgatagggcacctcataacaacaaccattcctcatttctggttacctctgttcttttgtgtgatagccggagtgatgtcactctttagttccaccctatccgtcgtagccccaactctctttcccatcattgctaccatcagtgctcaaagtcctcacattgatattcgcttactcacaacagccactattattggcgctctatctactaatatctctcctttttcatcagctggttccctcattcaactctcccttccccatatagaggaacgcagtcttgctttcaaaaaacaaattcttctgggtgtgcccatcagcttaagtttggcactcttgaccatctggattctcatgctgctagcttccttaagttag

SEQ ID NO: 564 - protein, 436 aa, Streptococcus pyogenes
MIHLIIISAIALAIGIGYRTKINIGLLAIAFSYLIATTLMGLSPKELLHFWPTSLFFTIFSVSLFYNVATTNGTLDVLAQHILYRTRTHPNALYMILYLIATLLSALGAGFFTTMAVCCPLAITLCQKADKHPLIGAQAVNWGASGGANLITSGSGIVFQGLFKQMGWEEQAFSLGNHIFIVSIIYPLIVLLLLSCYIRYSKGRTNSSLTIDQPPVLSKVQRQTTLLMISSMVLVWLFPLLLLIFPNIAWIATYRQTFDIGFVSILMVCLALRLKLGKQEAILAKVPWAIIIMLCGMSLLMSLAVKSGLVTLIGHLITTTIPHFWLPLFFCVIAGVMSLFSSTLSVVAPTLFPIIATISAQSPHIDIRLLTTATIIGALSTNISPFSSAGSLIQLSLPHIEERSLAFKKQILLGVPISLSLALLTIWILMLLASLS

SEQ ID NO: 565 - DNA, 327 bp, Streptococcus pyogenes
gtgaaaaacaaattatttttagttgcccttgcgaccgtaactgtcctagggccgtctttagcaacccctcatcaccagaccgtgcatgctagtgatgtaacattaactgagacatgtgataaaaacggaacagtatgttttggctacgaaaacgtagatggtgaagtatgtaaattaacagctgacggaaagggaaccatttgtgtgggttacgaaaatagagacataaaagagagtgaaacttctagcaccaaaaatgattgttctaattggttttggtgctttttaaattatctttggactacaataaaaagctgggtttcgtaa

SEQ ID NO: 566 - protein, 108 aa, Streptococcus pyogenes
MKNKLFLVALATVTVLGPSLATPHHQTVHASDVTLTETCDKNGTVCFGYENVDGEVCKLTADGKGTICVGYENRDIKESETSSTKNDCSNWFWCFLNYLWTTIKSWVS

SEQ ID NO: 567 - DNA, 429 bp, Streptococcus pyogenes
atgaaacaacaatcttaccagcctctacgcttcgtctacctcttggtggctctatttgctgctctgttgcttatagcaagacctgttatggcagatgagggaacaaatagtgctgatgcggcgtattataaagggcaaagtgctggagaagaagcagggaaaaaagctggaaaagaagctacttggactgatttgaccccaactgtcccaactaatccagaaacacctagtgacatcggagagactactaataaacagctctataaagaagggtataaagatgggtacaaagagggttataatgaaggctggaaatctcagtatcccgttttgactccggtcaaggttatatgggatttgatctcttattggctacagcgattattccccaataatcagtcaagtaccgcagcacaaagcatgtcataa

SEQ ID NO: 568 - protein, 142 aa, Streptococcus pyogenes
MKQQSYQPLRFVYLLVALFAALLLIARPVMADEGTNSADAAYYKGQSAGEEAGKKAGKEATWTDLTPTVPTNPETPSDIGETTNKQLYKEGYKDGYKEGYNEGWKSQYPVLTPVKVIWDLISYWLQRLFPNNQSSTAAQSMS

SEQ ID NO: 569 - DNA, 1353 bp, Streptococcus pyogenes
gtggtttacatgagaaacaaaaaagtaacattagctcatattgtcgcaaagacaagtgttgctattgctttggctggagcaatgggtagcagtttattagctaatagcacaacgtacgctgttagtggcaaagaaaataaaaaaagcgatgtcaaatatgaaacgaccaaagttatggaagctaacgcaacttcctctaaagaagacaatcatgtcatgcacacattagacggctcaatgagtactgtctgggaggaaaattcacctggtggtggtgttggtgaagtactttcctacaagtttgcgtccccgatgcatattgggagaattttaattgttaatggagatacatctagcaaggagaattactacaagaaaaatagaattgcaaaggctgatgttaaatactataacaggaataaattggtcctctttcaaaaaattgaattaggcgacacctacactaaaaaaccgcatcacattgagattgataaaaaattagatgttgatcgtattgatattgaggtaacagaggtccatcagggacaaaacaaggatattttagccttgtcagaggtcacttttggcaatatagaacgcgatatttttgaaaaaaagtttaaagaaattaaagataaatgggtaacagataaacaagcagatgagtttattgaaactgccgacaagtatgctgataaagctgttcagatgtctgctgttgcgtcacgtgctgagtattatcggatgtacgttagccgcaaataccactacaaaaaagagtttgttgaaaaactaaaacaagtctacaaagaaagcggagcttcccacgttacaagcaaaaaagatgtgatgttagcttttgacgatgctaaaaaaaagtcaacgattggtcgacaagaaaacggtctttttgtgacaagttttgctgaggatatggctttgctctttactgatcaaggtaagttaaaatcagctgaccaaattgaaaatataaaagatgtcgatagcggaaaatatagcgatggggtttatcaatatgagtacgattctgaactaacaaaaaacattgataagctaggctatatccgaacagctagcggagatactcctggagcaaattcgctcaacgttcctggttgccaaacgtggtcaggaaaacacattgaaaattcagaaagtgaattaattttcccatcgattagtgttaaagatctaaaatctaaagctgtcttagcagagattgatgccaaaggctattttgaaattattgatcctaccatcattgctccaaatggtgaccataaaaaagtaactggtcgcttcaaaattaagaaaatgcaagataggaagtaa

SEQ ID NO: 570 - protein, 450 aa, Streptococcus pyogenes
MVYMRNKKVTLAHIVAKTSVAIALAGAMGSSLLANSTTYAVSGKENKKSDVKYETTKVMEANATSSKEDNHVMHTLDGSMSTVWEENSPGGGVGEVLSYKFASPMHIGRILIVNGDTSSKENYYKKNRIAKADVKYYNRNKLVLFQKIELGDTYTKKPHHIEIDKKLDVDRIDIEVTEVHQGQNKDILALSEVTFGNIERDIFEKKFKEIKDKWVTDKQADEFIETADKYADKAVQMSAVASRAEYYRMYVSRKYHYKKEFVEKLKQVYKESGASHVTSKKDVMLAFDDAKKKSTIGRQENGLFVTSFAEDMALLFTDQGKLKSADQIENIKDVDSGKYSDGVYQYEYDSELTKNIDKLGYIRTASGDTPGANSLNVPGCQTWSGKHIENSESELIFPSISVKDLKSKAVLAEIDAKGYFEIIDPTIIAPNGDHKKVTGRFKIKKMQDRK

SEQ ID NO: 571 - DNA, 879 bp, Streptococcus pyogenes
atgattagaaagtatgaccgcacgagcacaaaaaagaaatcactaaactggatttggctaatcattgctttttttatgatttcaagctttataggtggctcttcttttactgagtcacttctagacattttgcctgccatagccattggtggtacaggttatgctatttttcgtgttagatctcatcaaaagcggctagcaaaggccaagattgccaaacaattagaagatctaaaagcaaaaattcagctagctgatcgtaaagttcggctgttagacacttatctggcagaccatgatgacttccaatataacgtactagctcagcaattattaccacaacttagtgacatcaaagcaaaagctattacgttaaaagaccagttagatccccaaatttatcgtcgtatcaccaaaaaagccaatgacgttgaaagtgatattacccttcaactcgaaacactgcagattgccacaactcttaaccctcagcctttgaaaaccccatctcctaatcttattaacaaagcacctgagctcaaaccgtattatgataatattcagacagatcatcaagctatccttgctaaaatccaaggagccgacaatcaagaagaattgcttgcgctgcatgatgctaacatgaggaggtttgaggatatcttaacaggctacttaaaaatcaaagaagagcctaaaaattactataacgctgctgctcgtttagaacaagccaaacaagctatccaacaatttgatgaagatcttgacgaaacccttcgtcgactcaatgaaagtgatcttaaagattttgatattagccttcgaatcatgcaaggtgctactcaaagacgaacaacgcatcaccaaaaagactaa

SEQ ID NO: 572 - protein, 292 aa, Streptococcus pyogenes
MIRKYDRTSTKKKSLNWIWLIIAFFMISSFIGGSSFTESLLDILPAIAIGGTGYAIFRVRSHQKRLAKAKIAKQLEDLKAKIQLADRKVRLLDTYLADHDDFQYNVLAQQLLPQLSDIKAKAITLKDQLDPQIYRRITKKANDVESDITLQLETLQIATTLNPQPLKTPSPNLINKAPELKPYYDNIQTDHQAILAKIQGADNQEELLALHDANMRRFEDILTGYLKIKEEPKNYYNAAARLEQAKQAIQQFDEDLDETLRRLNESDLKDFDISLRIMQGATQRRTTHHQKD

SEQ ID NO: 573 - DNA, 1416 bp, Streptococcus pyogenes
atgagcgttctcaaagaatatcggacggttagcgaagtggttggccctttgatgattgttgatcaagttgcaggagtgcactacaacgaattggtagatattactttgcataatggagaaaggcgtaaaggtcaagtcttagaagtccaaggtgacaaggctatggtacagctatttgaaggatcaactggcatcaacctagccaaaaccaaggttcgatttacagggcatcctttggaattagccgtatcagaagatatggtagggcgcatctttgatggaatggggcagcccatagacggcggtccagaacttattcccgaaaaataccttgatattgatggtcaagcgatcaatcctgtcgctcgtgattacccagacgaatttatccagacaggtatctcagctattgatcacctcaataccctcgttcgtggtcaaaagttaccagttttttcgggctcagggttacctcataatgaattggccgcacagattgctcgtcaggcaactgttctaaactctgatgataactttgcggttgtgtttgcagctatgggtattacttttgaagaggcagaattctttatgaatgacttgcgtgaaacgggtgccattgatcgatctgttttatttatcaatttagctaatgaccctgctattgaacgcattgcaacaccacgtatagctctgacaacagccgaatacttggcttatgaaaaaggtatgcatgttttagtcatcatgacagatatgacaaattattgtgaagccttacgagaagtatcagccgctcgcagagaagttccaggcagacgaggttatcctggctatctctatactaatctctccaccttatatgaacgggctggtcgcttgatcgggaaaaaagggtcagtgactcaaattcctattttaaccatgccagaagatgacattacccaccctatccccgatttgacaggttatattaccgaaggtcagattattttgtcgcaagaactatataaaaatggttttagaccgcctattaatgtcttgccatcgctatctcgcctaaaagataaaggctcaggtgaaggtaagactcgacaagaccatgctgctacaatgaatcagctctttgcagcctatgcccaaggaaaacaagctaaggaattggctgttgtgctcggtgaatcagccctttctgaaacggataaactatatgtggcctttaccaaccggtttgaagaagaatacattaaccaaggattttacaccaaccgtagcattgaagaaagtcttgacttgggttgggaattgttgtcgattttgccacgtaccgaattaaaacgcattaaagatgatatgttagatcgttatttgcctaaagcagataccacgatgacaaaggtttttgttgcaaatgattga

SEQ ID NO: 574 - protein, 471 aa, Streptococcus pyogenes
MSVLKEYRTVSEVVGPLMIVDQVAGVHYNELVDITLHNGERRKGQVLEVQGDKAMVQLFEGSTGINLAKTKVRFTGHPLELAVSEDMVGRIFDGMGQPIDGGPELIPEKYLDIDGQAINPVARDYPDEFIQTGISAIDHLNTLVRGQKLPVFSGSGLPHNELAAQIARQATVLNSDDNFAVVFAAMGITFEEAEFFMNDLRETGAIDRSVLFINLANDPAIERIATPRIALTTAEYLAYEKGMHVLVIMTDMTNYCEALREVSAARREVPGRRGYPGYLYTNLSTLYERAGRLIGKKGSVTQIPILTMPEDDITHPIPDLTGYITEGQIILSQELYKNGFRPPINVLPSLSRLKDKGSGEGKTRQDHAATMNQLFAAYAQGKQAKELAVVLGESALSETDKLYVAFTNRFEEEYINQGFYTNRSIEESLDLGWELLSILPRTELKRIKDDMLDRYLPKADTTMTKVFVAND

SEQ ID NO: 575 - DNA, 1440 bp, Streptococcus pyogenes
gtgcttttggacaatgtgaaaggaattgacaacatgaataacatcaaaaccaaaaaaaggtttatggatcgctatattgatggctttatgaaatggatgccagaatcgctttttatctgttttattttaacctttttagtcgttactatgtctgtgttgatgacggatagtccctttattggtacggaaaagacgggcgggattatctatggctgggtaaatggtttttgggggctgttgtcctttgccatgcagatgactattttacttgcgacagggaatgctgtagcgagttctccacctgctcataagatgtttaagtcccttgccaaactgcctcaaaccaggactcagatttttatcttttccattgtagtaggctctatctttggctttttacactggggtcttggtatgatggttgctattgtgtttgggaaagagttgcttgttcaggctaggcaaaaagggattaaggtgcatacgcctttgtttgttgctactttattttttacctttttaccagctacttctggtctatctggtgctgcggtgctttattcggctactccagattatttgcgaaatagtgtcgcagatgcttataaacaggttgttcctgaaagtgttcctctgacagaatcagttttgaatcttccatttatcagtcttttagtggtgtgtatgctggtaccgctttgctttgctttattggcgcacccaaaagatgaaactaaaatcatggaacttgatgatgagatctatcaccatagtcttgataccgcttcacatgttgttattgcaagaaacacacctgctgaaaagatgaacgcatctcgcttagtgatgtatcttgttggtggggccattgttagctatagcctttatcatttttcggtggtgggcttgtctggtctagatctcaattgttttaactttttatttttaggcttaggcttgcttctttgtggtcaacaaggaccagaatattatggttccttattcaaagatggggtcatgtcatcttggggcttggtgcttcagtttccattttacgctggtatttttggaatcattcaaagtacaggtttaggattagagatttcccatttctttgtcgctatttcaaatgggacaacatggccggtctttgcttatctttactcggctttgctgaatattgcggtaccatcaggaggctcaaaatttgtgattgaagctccctatatcgtccctgcaactatcgaagttggtaatgacttaggtaagattttgcaggcttatcaattaggagatgccacaacaaacttgatagttcctttttgggccttatcttacctctcaaacttcaaactaaaattcaatcaaattgtggcttatactattccttgtgtcttggtggtcacaggtattgccatcatttacctatttgtattttag

SEQ ID NO: 576 - protein, 479 aa, Streptococcus pyogenes
MLLDNVKGIDNMNNIKTKKRFMDRYIDGFMKWMPESLFICFILTFLVVTMSVLMTDSPFIGTEKTGGIIYGWVNGFWGLLSFAMQMTILLATGNAVASSPPAHKMFKSLAKLPQTRTQIFIFSIVVGSIFGFLHWGLGMMVAIVFGKELLVQARQKGIKVHTPLFVATLFFTFLPATSGLSGAAVLYSATPDYLRNSVADAYKQVVPESVPLTESVLNLPFISLLVVCMLVPLCFALLAHPKDETKIMELDDEIYHHSLDTASHVVIARNTPAEKMNASRLVMYLVGGAIVSYSLYHFSVVGLSGLDLNCFNFLFLGLGLLLCGQQGPEYYGSLFKDGVMSSWGLVLQFPFYAGIFGIIQSTGLGLEISHFFVAISNGTTWPVFAYLYSALLNIAVPSGGSKFVIEAPYIVPATIEVGNDLGKILQAYQLGDATTNLIVPFWALSYLSNFKLKFNQIVAYTIPCVLVVTGIAIIYLFVF

SEQ ID NO: 577 - DNA, 666 bp, Streptococcus pyogenes
atgaaacgatgtaataaatatctcttcacttcactactagcagcttcgatgctgtttagttcgtataaatcagtacatgcccatgataacattgatgagaaaggtaaagtgcacctttactggcagggaaattactatgttgataactatgtcgactatactaaaaaattggtcgatagcgataaaaatattgaatggactgtaacctttaattcagctaaagaacaatgggtttaccctgatttctcagtttttcttcctaagggtgtaaaagctcctacagagataacttatgagcatcattattgggacggtacagttcgttctgaaacacgcaataatacacaatggcattatgattggaaaagccaacaaacaaattttaatcaagaatttgataaattccctggttatactggttggagtccttctctagataaattttacaaactaaaaaacgacggaaaattttctcacgttttagtagatacctatggccgtcaatcacacacttatttttctcataaaatggtttggaagtttaaaactgagcttgaagataattacaaaaataaatgggataaattaccgtttatagcaggtattaaacaaaacaacccattagcagcatcattcccaagttataaaggggaattcggtgagtaa

SEQ ID NO: 578 - protein, 221 aa, Streptococcus pyogenes
MKRCNKYLFTSLLAASMLFSSYKSVHAHDNIDEKGKVHLYWQGNYYVDNYVDYTKKLVDSDKNIEWTVTFNSAKEQWVYPDFSVFLPKGVKAPTEITYEHHYWDGTVRSETRNNTQWHYDWKSQQTNFNQEFDKFPGYTGWSPSLDKFYKLKNDGKFSHVLVDTYGRQSHTYFSHKMVWKFKTELEDNYKNKWDKLPFIAGIKQNNPLAASFPSYKGEFGE

SEQ ID NO: 579 - DNA, 756 bp, Streptococcus pyogenes
gtggaatgctatcgtgatcgtcaattgttatcaacttatcacaaacaagtgactcaaaagaagccctcagaaatggaggaggtgtggcaaaaggctaaggcgtataacgctaggcttgggattcagcctgttccagatgctttttcatttagggatggcattcatgataaaaactacgaaagcctacttcaaattgaaaacaatgatattatgggatatgttgaagtgccctctattaaagtgacgttacccatataccactatacgacagacgaggtgctaactaaaggagcaggtcacttatttggaagtgccttaccagttggtggtgacgggactcacacggttatttctgctcatagaggccttccatcggcagaaatgtttactaatttgaatttagtgaaaaagggagatactttttactttcgtgtgttaaataaagtattggcttataaagttgatcagatactaactgttgaaccagatcaagtcacatcactttctggagtcatggggaaagattatgctactttggttacctgcacaccatatggtgttaacaccaagcgtctattggtccgaggtcatagaattgcatatcattataaaaagtatcaacaggctaaaaaagcaatgaaactcgtggataaatcaagaatgtgggcagaagtagtgtgtgctgctttcggggtggttatagctattattttagtgtttatgtattcgcgagtaagtgctaagaaaagcaagtga

SEQ ID NO: 580 - protein, 251 aa, Streptococcus pyogenes
MECYRDRQLLSTYHKQVTQKKPSEMEEVWQKAKAYNARLGIQPVPDAFSFRDGIHDKNYESLLQIENNDIMGYVEVPSIKVTLPIYHYTTDEVLTKGAGHLFGSALPVGGDGTHTVISAHRGLPSAEMFTNLNLVKKGDTFYFRVLNKVLAYKVDQILTVEPDQVTSLSGVMGKDYATLVTCTPYGVNTKRLLVRGHRIAYHYKKYQQAKKAMKLVDKSRMWAEVVCAAFGVVIAIILVFMYSRVSAKKSK

SEQ ID NO: 581 - DNA, 714 bp, Streptococcus pyogenes
atgatagtaagactgattaagctccttgacaagttgataaacgtcattgttctttgtttcttctttctttgtttattgattgcggcacttggaatctacgatgctttaacagtttatcaaggagctaatgctactaactatcaacaatataagaaaaagggtgttcagtttgacgatttattagctattaattctgatgttatggcatggctgactgttaaaggaacgcatattgattatccaattgtacagggagagaataatttagaatatatcaacaaatcagtagaaggagagtactccttatcaggaagtgtttttctagattatcgtaataaagtaacttttgaagataaatactcattaatctatgcacatcatatggctggaaatgttatgtttggcgaattacctaactttaggaaaaaatcattttttaataaacacaaagaatttagtattgaaaccaaaacaaagcaaaaactgaaaatcaatatttttgcatgtatccaaacagatgcttttgacagtttactgtttaatccaattgatgttgatatttctagtaaaaatgaatttttaaaccatatcaagcaaaaatcggtacagtatcgtgaaatattgacaacaaatgaaagtcgttttgttgccttatcaacctgtgaggatatgacaacagatggtaggattatcgttattggacaaattgaataa

SEQ ID NO: 582 - protein, 237 aa, Streptococcus pyogenes
MIVRLIKLLDKLINVIVLCFFFLCLLIAALGIYDALTVYQGANATNYQQYKKKGVQFDDLLAINSDVMAWLTVKGTHIDYPIVQGENNLEYINKSVEGEYSLSGSVFLDYRNKVTFEDKYSLIYAHHMAGNVMFGELPNFRKKSFFNKHKEFSIETKTKQKLKINIFACIQTDAFDSLLFNPIDVDISSKNEFLNHIKQKSVQYREILTTNESRFVALSTCEDMTTDGRIIVIGQIE

SEQ ID NO: 583 - DNA, 2289 bp, Streptococcus pyogenes
ttgagaggagagaaaatgaaaaaaacaaggtttccaaataagcttaatactcttaatactcaaagggtattaagtaaaaactcaaaacgatttactgtcactttagtgggagtctttttaatgatcttcgctttggtaacttccatggttggtgctaagactgtttttggtttagtagaatcctcgacgccaaacgcaataaatccagattcaagttcggaatacagatggtatggatatgaatcttatgtaagagggcatccatattataaacagtttagagtagcacacgatttaagggttaacttagaaggaagtagaagttatcaagtttattgctttaatttaaagaaagcatttcctctcggatcagatagtagtgttaaaaagtggtataaaaaacatgatggaatctctacaaaatttgaagattatgcgatgagccctagaattacgggagatgagctaaatcagaagttacgagctgttatgtataatggacatccacaaaatgccaatggtattatggaaggcttggaacccttgaatgctatcagagttacacaagaggcggtatggtactattctgataatgctcctatttctaatccagatgaaagttttaaaagggagtcagaaagtaacttggttagtacttctcaattatctttgatgcgtcaagctttgaagcaactgattgatccgaatttggcaactaaaatgccaaaacaagttccggatgattttcagctaagtatttttgagtctgaggacaagggagataaatataataaaggataccaaaatcttttgagtggtggtttagttcctactaaaccaccaactccaggagacccaccaatgcctccaaatcaacctcaaacgacttcagtacttattagaaagtatgctataggtgattactctaaattgcttgaaggtgcaacattacagttgacaggggataacgtgaatagttttcaagcgagagtgtttagcagtaatgatattggagaaagaattgaactatcagatggaacttatactttaactgaattgaattctccagctggttatagtatcgcagagccaatcacttttaaggttgaagctggcaaagtgtatactattattgatggaaaacagattgaaaatcccaataaagagatagtagagccttactcagtagaagcatataatgattttgaagaatttagcgttttaactacacaaaactatgcaaaattttattatgcaaaaaataaaaatggaagttcacaggttgtctattgctttaatgcagatctaaaatctccaccagactctgaagatggtgggaaaacaatgactccagactttacaacaggagaagtaaaatacactcatattgcaggtcgtgacctctttaaatatactgtgaaaccaagagataccgatcctgacactttcttaaaacatatcaaaaaagtaattgagaagggttacagggaaaaaggacaagctattgagtatagtggtctaactgagacacaattgcgtgcggctactcagttagcaatatattatttcactgatagtgctgaattagataaggataaactaaaagactatcatggttttggagacatgaatgatagtactttagcagttgctaaaatccttgtagaatacgctcaagatagtaatcctccacagctaactgaccttgatttctttattccgaataacaataaatatcaatctcttattggaactcagtggcatccagaagatttagttgatattattcgtatggaagataaaaaagaagttatacctgtaactcataatttaacattgagaaaaacggtgactggtttagctggtgacagaactaaagatttccattttgaaattgaattaaaaaataataagcaagaattgctttctcaaactgttaaaacagataaaacaaacctcgaatttaaagatggtaaagcaaccattaatttaaaacatggggaaagtttaacacttcaaggtttaccagaaggttattcttaccttgtcaaagaaacagattctgaaggctataaggttaaagttaatagccaagaagtagcaaatgctacagtttcaaaaacaggaataacaagtgatgagacacttgcttttgaaaataataaagagcctgttgttcctacaggagttgatcaaaagatcaatggctatctagctttgatagttatcgctggtatcagtttggggatctggggaattcacacgataaggataagaaaacatgactag

SEQ ID NO: 584 - protein, 762 aa, Streptococcus pyogenes
MRGEKMKKTRFPNKLNTLNTQRVLSKNSKRFTVTLVGVFLMIFALVTSMVGAKTVFGLVESSTPNAINPDSSSEYRWYGYESYVRGHPYYKQFRVAHDLRVNLEGSRSYQVYCFNLKKAFPLGSDSSVKKWYKKHDGISTKFEDYAMSPRITGDELNQKLRAVMYNGHPQNANGIMEGLEPLNAIRVTQEAVWYYSDNAPISNPDESFKRESESNLVSTSQLSLMRQALKQLIDPNLATKMPKQVPDDFQLSIFESEDKGDKYNKGYQNLLSGGLVPTKPPTPGDPPMPPNQPQTTSVLIRKYAIGDYSKLLEGATLQLTGDNVNSFQARVFSSNDIGERIELSDGTYTLTELNSPAGYSIAEPITFKVEAGKVYTIIDGKQIENPNKEIVEPYSVEAYNDFEEFSVLTTQNYAKFYYAKNKNGSSQVVYCFNADLKSPPDSEDGGKTMTPDFTTGEVKYTHIAGRDLFKYTVKPRDTDPDTFLKHIKKVIEKGYREKGQAIEYSGLTETQLRAATQLAIYYFTDSAELDKDKLKDYHGFGDMNDSTLAVAKILVEYAQDSNPPQLTDLDFFIPNNNKYQSLIGTQWHPEDLVDIIRMEDKKEVIPVTHNLTLRKTVTGLAGDRTKDFHFEIELKNNKQELLSQTVKTDKTNLEFKDGKATINLKHGESLTLQGLPEGYSYLVKETDSEGYKVKVNSQEVANATVSKTGITSDETLAFENNKEPVVPTGVDQKINGYLALIVIAGISLGIWGIHTIRIRKHD

SEQ ID NO: 585 - DNA, 285 bp, Streptococcus pyogenes
gtgggaattatcaaaaaacaagtcaaagcttacatagcccttgaaagtatgatcgcaacaggcatcctctttagtattgtcattctcgtcttaagcagtttacagcagagtcaggctgctctaacgtactatcgaaagcagcaagaaaagcttaatctagccttgatggcagtacaaactagaactaaagagatgacattgaatggttgtcatattactattttacgtacggatagatacattagtattcacgatgacgaaggagaagtgatgaagattgagtaa

SEQ ID NO: 586 - protein, 94 aa, Streptococcus pyogenes
MGIIKKQVKAYIALESMIATGILFSIVILVLSSLQQSQAALTYYRKQQEKLNLALMAVQTRTKEMTLNGCHITILRTDRYISIHDDEGEVMKIE

SEQ ID NO: 587 - DNA, 378 bp, Streptococcus pyogenes
atgcggcaatcctattaccaatttaccaaaatatgggaggtattttttaagatgattaatcaatggaacaacttacgacacaagaagctaaaaggatttactcttctagaaatgttattggtgattcttgtcatcagtgttttgatgctattatttgtgcctaatttaagcaagcaaaaagacagggttacagaaacaggtaatgccgctgttgttaaattagtggagaatcaagcagaactatatgaattatctcaaggctcaaaaccaagtttgagccagttaaaggcagatggtagtatcactgagaaacaagaaaaagcttatcaagactattatgacaaacataaaaatgaaaaagcccgtcttagcaattaa

SEQ ID NO: 588 - protein, 125 aa, Streptococcus pyogenes
MRQSYYQFTKIWEVFFKMINQWNNLRHKKLKGFTLLEMLLVILVISVLMLLFVPNLSKQKDRVTETGNAAVVKLVENQAELYELSQGSKPSLSQLKADGSITEKQEKAYQDYYDKHKNEKARLSN

SEQ ID NO: 589 - DNA, 939 bp, Streptococcus pyogenes
atggtacaagcattagcaaaagctattctagcaaaagctgaacaggttcatgcacaagatatttatattttgccaagagcagatcaatatgatctttttttacgaataggagatgaaaggagattagttgatgtttatcagagcgatcggatggctcctcttattagtcactttaaattcgttgcaggaatgatagttggtgaaaagagacgttgtcaggtgggttcatgtgattataagcttagtaaagataagcagttatctttgcgcttatctagcgtgggtgattatcgcgggcaagaaagcttagtgattcgtctgcttcatcatcaaaataaaagtgtacattattggtttgatggattgacaaaagtagccaatcaggttggcggtagagggttgtatttatttgcaggaccagttgggtctgggaagacaaccttgatgtaccagctgatttcgaattatcatcaagaagcacaggttattagtatagaagatcctgtagaaattaaaaatcaccaaattttacaattacaagtgaatgatgatattggtatgacttatgacaatttgatcaaactgtctttacgccatcgaccagatattttagttattggtgagattcgagatagtcaaacagcaagagccgttattagggctagtctaacaggtgccatggttttttcaacggttcacgctaaaagtatctcgggtgtttatgcaagattgttagaacttggtgtaacgaaagcagaactgtctaattgcttagcattaattgcttaccaaaggttacttaatggaggagcattgattgactctactcaaaacgaatttgaatattattcctcatcgaactggaatcaacaaattgatcagcttcttgaggcaggacatctcaatcccaagcaagctaagcttgaaaaaattatctag

SEQ ID NO: 590 - protein, 312 aa, Streptococcus pyogenes
MVQALAKAILAKAEQVHAQDIYILPRADQYDLFLRIGDERRLVDVYQSDRMAPLISHFKFVAGMIVGEKRRCQVGSCDYKLSKDKQLSLRLSSVGDYRGQESLVIRLLHHQNKSVHYWFDGLTKVANQVGGRGLYLFAGPVGSGKTTLMYQLISNYHQEAQVISIEDPVEIKNHQILQLQVNDDIGMTYDNLIKLSLRHRPDILVIGEIRDSQTARAVIRASLTGAMVFSTVHAKSISGVYARLLELGVTKAELSNCLALIAYQRLLNGGALIDSTQNEFEYYSSSNWNQQIDQLLEAGHLNPKQAKLEKII

SEQ ID NO: 591 - DNA, 855 bp, Streptococcus pyogenes
atgaagctgaaacagatgacgaaaaaggaggtcatggtcatgcttgatattttattctatgatttcatgcaacgggcggtaatggcggtagttgccattagtatttttgctccgattttaggtattttccttattttacgtcgtcaaagtttgatgagcgatacccttagtcatgtttctttggctggggtagcgcttggggtagtccttggtatttcaccaaccatcactactattattgttgtggttttagctgctattttgttagaatacctgcgtgtagtttacaaacactacatggagatttcaacggcgattttgatgtcacttggcttggccctatctctgattattatgagtaagtcgcatagttcatcaagcatgagtttagaacaatacctttttggatcgatcatcacgattagtatggaacaagttgtcgccttgtttgctattgctgcgattattttaatcttgaccgttctcttcattagaccgatgtacattctgacctttgatgaagatactgcttttgtagatggtttgcccgttcgcttgatgtctgttctattcaatatcgtcactggggttgctattgctttgaccattccagcagcaggagcacttttggtttctaccattatggtcttgccagcaagtatcgcaatgagattgggtaaaaactttaaaacagttatcttactgggaattgtcatcggttttagcggtatgttatctggtattttcttatcttatttctttgaaacgccagctagtgccactattaccatgattttcattagtattttcctcttagttagtctaggtggaatgcttaaaaaacggttattttaa

SEQ ID NO: 592 - protein, 284 aa, Streptococcus pyogenes
MKLKQMTKKEVMVMLDILFYDFMQRAVMAVVAISIFAPILGIFLILRRQSLMSDTLSHVSLAGVALGVVLGISPTITTIIVVVLAAILLEYLRVVYKHYMEISTAILMSLGLALSLIIMSKSHSSSSMSLEQYLFGSIITISMEQVVALFAIAAIILILTVLFIRPMYILTFDEDTAFVDGLPVRLMSVLFNIVTGVAIALTIPAAGALLVSTIMVLPASIAMRLGKNFKTVILLGIVIGFSGMLSGIFLSYFFETPASATITMIFISIFLLVSLGGMLKKRLF

SEQ ID NO: 593 - DNA, 720 bp, Streptococcus pyogenes
atgagatacatatcagtgaaaaatctctcctttcaatatgaaagtgagccagttttagaagggatcacttatcatttagatagtggagaatttgtcaccatgaccggtgaaaatggtgctgcaaagtcaaccttaataaaagcaaccttaggaattttacaaccaaaggctggacgagttactattgctaaaaaaaataaagacggtaaacaattaagaattgcttacttgccgcagcaagtagctagctttaacgctggttttccatccaccgtttacgagtttgtcaaatcaggtcgctacccacgtagtggttggtttagacatttgaacaaacacgatgaagagcatgtgcaagcaagcttagaagcagtcggcatgtgggaaaaccgtcataagagaattggtagtttatcaggtggtcaaaaacaacgtgtggttattgcccgtatgtttgcttctgaccctgatatttttgtgctagacgagccaacaacgggaatggatagcggtactactgataccttttatgaactgatgcaccacagtgcacatcaacatgggaaatccgttctgatgattacccatgacccagaagaagtgaaggcttatgctgatcggaacattcatttagtcagaaaccaaaaacttccttggcgttgtttcaacattcatgaagctgaaacagatgacgaaaaaggaggtcatggtcatgcttga

SEQ ID NO: 594 - protein, 239 aa, Streptococcus pyogenes
MRYISVKNLSFQYESEPVLEGITYHLDSGEFVTMTGENGAAKSTLIKATLGILQPKAGRVTIAKKNKDGKQLRIAYLPQQVASFNAGFPSTVYEFVKSGRYPRSGWFRHLNKHDEEHVQASLEAVGMWENRHKRIGSLSGGQKQRVVIARMFASDPDIFVLDEPTTGMDSGTTDTFYELMHHSAHQHGKSVLMITHDPEEVKAYADRNIHLVRNQKLPWRCFNIHEAETDDEKGGHGHA

SEQ ID NO: 595 - DNA, 1353 bp, Streptococcus pyogenes
ttgctaaaggtggttcaatcgaagtcatctaatgaggggatactcattatgttcttaaaaatactaaaagacgcgttaaagataaagactgtacggaataaaattttctttactatatttatcattcttgtattccgaattgggacacatattaccgtacctggtgtaaatgccaagagcttagagcaattaagtgaactccctttcttaaatatgttaaacttagttagtggtaatgcgatgagaaatttctcagtattttcaatgggggttagcccatatattactgcttctatcgttgttcagttattgcagatggatattttacctaagtttgttgagtggggcaaacaaggtgaggttggacgtcgtaaattaaatcaagcgacgcgctatatttcacttgttttggcttttgcccaatccattggtatcactgcagggtttaatactttgtcgaacgttgcacttgttaagacaccagacatcaaaacatatttactgatcggggcattactgacaacaggtagcgttattgttacctggcttggagaacaaatcacagataaaggatttggtaatggcgtatcaatgattatctttgcgggtattatttcgtctattccaagtgcaattgcaacaattcgtgaagactattttgtaaatgttaaggcaagtgatttacactcgtcttatctcattgttgggattttaatcatagctgttcttgctattgttttctttacaacatatgtccaacaagcggaatataaaattccaatccaatacacaaagctaatgcaaggtgcacctacaagttcatatcttccattaaaagtaaatccagccggcgttattcccgttatctttgctagctcgattacaactatcccaagtacgattattccttttgttcaaaatggtagagatttaccgtggttaaaccgtttgcaagaaatttttaattatcaaactccagtcggaatgatagtttacgccttgttgattatattgttctcattcttctatacctttgtacaagttaatcctgagaagacagcagaaaatcttcagaagaattcctcatatataccaagtgttcgccctggacgtgagacagaacaatttatgtccgcattgctaaaaaaactagcaaccgtaggagctatcttcttagcatttatctctttagcgccaatagcagcacaacaagctctcaacctttcttctagtattgctttaggtggaactagtttgctcattttgatttcaactggtatcgaaggtatgaaacagcttgagggatatcttctaaagagaaaatatgtcggatttatgaatacagcagaatag

SEQ ID NO: 596 - protein, 450 aa, Streptococcus pyogenes
MLKVVQSKSSNEGILIMFLKILKDALKIKTVRNKIFFTIFIILVFRIGTHITVPGVNAKSLEQLSELPFLNMLNLVSGNAMRNFSVFSMGVSPYITASIVVQLLQMDILPKFVEWGKQGEVGRRKLNQATRYISLVLAFAQSIGITAGFNTLSNVALVKTPDIKTYLLIGALLTTGSVIVTWLGEQITDKGFGNGVSMIIFAGIISSIPSAIATIREDYFVNVKASDLHSSYLIVGILIIAVLAIVFFTTYVQQAEYKIPIQYTKLMQGAPTSSYLPLKVNPAGVIPVIFASSITTIPSTIIPFVQNGRDLPWLNRLQEIFNYQTPVGMIVYALLIILFSFFYTFVQVNPEKTAENLQKNSSYIPSVRPGRETEQFMSALLKKLATVGAIFLAFISLAPIAAQQALNLSSSIALGGTSLLILISTGIEGMKQLEGYLLKRKYVGFMNTAE

SEQ ID NO: 597 - DNA, 1125 bp, Streptococcus pyogenes
atgaaaaaatttcatcgttttttggtctcaggagtaatccttttaggttttaatggtctagtacctactatgccatctacacttatttcgcaacaggaaaatcttgttcatgcagctgttttaggcgataactatccgagtaagtggaaaaaaggcaatggaatcgattcgtggaacatgtatatccgccaatgcacttcttttgcagcttttcgtttaagctctgctaatggttttcagttacctaaaggctacggtaatgcctgcacgtggggacatatcgcgaaaaatcagggttatcctgtgaataagacaccaagcataggggctatcgcttggtttgataaaaacgcttatcagtcaaatgctgcttacggtcatgtagcatgggtagctgatatccgtggagacactgtcactatcgaagagtataattacaacgctggacaaggccctgaaagataccataagcgtcaaattccaaaatctcaggtaagtggttatatccattttaaagacttatcatctcagacaagtcattcctacccaagacaactaaaacacatttctcaagcttcatttgacccctctggaacttatcactttacaaccagattaccagtcaaaggacaaaccagtatcgatagccctgatcttgcttactatgaagcaggtcaatctgtttattacgataaagtcgtgactgctggaggttatacatggcttagctacctcagtttttctggaaaccgacgctatattcccattaaagagcccgcacagtctgtggttcaaaatgacaatacaaaaccttccattaaggtcggtgatactgttaccttccctggcgtttttcgtgtagatcagcttgttaataatttgatcgttaataaagaattagccggaggagacccaactccactaaactggattgatcccacaccattagatgaaacagataaccaaggaaaagttttaggagatcaaattctccgtgtgggtgaatattttatcgtcactggtagttataaagtattaaaaattgatcaaccaagtaatggtatttatgttcaaatcggatctcgtggaacatgggtaaatgctgataaagctaacaaattatag

SEQ ID NO: 598 - protein, 374 aa, Streptococcus pyogenes
MKKFHRFLVSGVILLGFNGLVPTMPSTLISQQENLVHAAVLGDNYPSKWKKGNGIDSWNMYIRQCTSFAAFRLSSANGFQLPKGYGNACTWGHIAKNQGYPVNKTPSIGAIAWFDKNAYQSNAAYGHVAWVADIRGDTVTIEEYNYNAGQGPERYHKRQIPKSQVSGYIHFKDLSSQTSHSYPRQLKHISQASFDPSGTYHFTTRLPVKGQTSIDSPDLAYYEAGQSVYYDKVVTAGGYTWLSYLSFSGNRRYIPIKEPAQSVVQNDNTKPSIKVGDTVTFPGVFRVDQLVNNLIVNKELAGGDPTPLNWIDPTPLDETDNQGKVLGDQILRVGEYFIVTGSYKVLKIDQPSNGIYVQIGSRGTWVNADKANKL

SEQ ID NO: 599 - DNA, 1197 bp, Streptococcus pyogenes
atgaaaaaaagaattttatcagcagttcttgtaagtggtgttaccctcggagcagctacaactgtaggagcggaggatttaagtactaagattgctaagcaagattctattatctcaaatctgactacagagcaaaaagctgcacagaatcaagtttcagcgttacaggctcaagtaagttcactacaatctgaacaagataaactgaccgcaagaaatacagaacttgaggcgctttcaaagcgatttgagcaagaaattaaggctctaacaagtcaaattgttgctcgtaatgaaaaattaaaaaatcaagctcgtagtgcttataaaaacaatgaaacttctggttatattaatgcacttttgaattctaaatcaatttctgatgttgtaaaccgtttagtagcaattaatagagctgtctctgctaacgctaaattgttagaacaacaaaaagctgataaagtttcccttgaagaaaagcaagctgctaaccaaacagctattaataccattgccgctaatatggcaatggctgaagaaaaccaaaatacattacgtactcaacaagctaatttggtagctgcaactgcaaatttagctctccaattagcatctgctactgaagataaagctaatttggtagctcaaaaagaagctgcagaaaaagctgctgctgaagccttagcacaagaacaggctgctaaagttaaggcacaagaacaggctgcacaacaagcagcatctgttgaagcagcaaaatctgctattactccagcaccacaagctactccggcagcgcaaagtagtaatgctattgaaccagctgcactcacggctccggcagctccttctgcaggaccacaaacatcatatgattcttctaatacttatccagttggacaatgcacatggggagctaaatctttagctccttgggcaggaaataattggggaaatggtggtcaatgggcttatagtgctcaagcagctggttatcgtactggttcaacgccgatggtaggtgcgattgccgtttggaacgatggtggttatggacatgtcgccgttgtagttgaggttcaaagtgcctcaagtattcgtgtgatggagtctaactacagtggtagacagtacattgctgaccaccgtggctggtttaatccaacaggtgttacatttatttatccacactaa

SEQ ID NO: 600 - protein, 398 aa, Streptococcus pyogenes
MKKRILSAVLVSGVTLGAATTVGAEDLSTKIAKQDSIISNLTTEQKAAQNQVSALQAQVSSLQSEQDKLTARNTELEALSKRFEQEIKALTSQIVARNEKLKNQARSAYKNNETSGYINALLNSKSISDVVNRLVAINRAVSANAKLLEQQKADKVSLEEKQAANQTAINTIAANMAMAEENQNTLRTQQANLVAATANLALQLASATEDKANLVAQKEAAEKAAAEALAQEQAAKVKAQEQAAQQAASVEAAKSAITPAPQATPAAQSSNAIEPAALTAPAAPSAGPQTSYDSSNTYPVGQCTWGAKSLAPWAGNNWGNGGQWAYSAQAAGYRTGSTPMVGAIAVWNDGGYGHVAVVVEVQSASSIRVMESNYSGRQYIADHRGWFNPTGVTFIYPH

SEQ ID NO: 601 - DNA, 1287 bp, Streptococcus pyogenes
atgagaaaattattagcggctatgttaatgactttttttctgactcctttaccagtgattagtacagaaaaaaaacttatattttcaaaaaatgctgtttatcaattgaaacaagatgtcgttcaatcaacacaattctataatcaaataccctctaatccaaatctttatcaagaaacgtgtgcctataaagacagtgatttaactctaccagcaggaagattaggtgtaaatcaaccattacttattaaatcgcttgtgcttaacaaagaatctttaccggtttttgagttagctgatggtacctatgttgaggctaatcgacaattgatttatgacgatattgtacttaatcaagtagatatagatagctatttttggacacaaaagaaacttaggctttattcagccccttatgttttaggtacgcaaacaattccttcttcttttttatttgctcaaaaagttcatgccactcaaatggcacaaacaaaccatggaacttattatcttattgatgataagggctgggcatcacaagaagatctagttcaatttgataaccgcatgttaaaagtccaggaaatgctcttacaaaaatataataacccaaattattcaatttttgtaaagcaactcaacacacaaacaagtgctggtattaatgctgataaaaaaatgtatgctgcaagtatctcgaagttagcaccactttatattgttcaaaaacaattacaaaaaaagaaattagcagagaataaaactttgacttatactaaagatgttaatcatttttatggagactatgatccattgggaagtggtaaaattagtaaaatagctgataataaagattatcgtgttgaagacctactgaaagctgtagcacaacaatcggataatgtagcaactaatattttaggttattatctatgtcatcagtatgataaagctttccgctcagagataaaagctttatcaggtatcgattgggatatggagcagcgcttattaacttctcgttcagctgcaaatatgatggaagctatttatcatcaaaaaggccaaattatttcttacctttcaaataccgaatttgatcaacaacgtatcacaaaaaatattactgttccagttgcacataaaattggtgatgcttatgattataaacatgacgttgctattgtttacggtaatactccatttattttgtctatttttacaaataaatcaacctatgaagatattacggctattgcagatgacgtttatggtattttaaaatga

SEQ ID NO: 602 - protein, 428 aa, Streptococcus pyogenes
MRKLLAAMLMTFFLTPLPVISTEKKLIFSKNAVYQLKQDVVQSTQFYNQIPSNPNLYQETCAYKDSDLTLPAGRLGVNQPLLIKSLVLNKESLPVFELADGTYVEANRQLIYDDIVLNQVDIDSYFWTQKKLRLYSAPYVLGTQTIPSSFLFAQKVHATQMAQTNHGTYYLIDDKGWASQEDLVQFDNRMLKVQEMLLQKYNNPNYSIFVKQLNTQTSAGINADKKMYAASISKLAPLYIVQKQLQKKKLAENKTLTYTKDVNHFYGDYDPLGSGKISKIADNKDYRVEDLLKAVAQQSDNVATNILGYYLCHQYDKAFRSEIKALSGIDWDMEQRLLTSRSAANMMEAIYHQKGQIISYLSNTEFDQQRITKNITVPVAHKIGDAYDYKHDVAIVYGNTPFILSIFTNKSTYEDITAIADDVYGILK

SEQ ID NO: 603 - DNA, 2577 bp, Streptococcus pyogenes
atgaaaaataataataaatggataattgctggacttgctagttttttgttccctcttagtattatatttatcatccttctatcgatgggcatttattataatagtgataaaacaattctagctagtgatgcttttcatcagtatgttatttttgcgcagaactttcgtaacatcatgcacggttctgatagttttttttatacctttacaagcggactagggataaatttttatgctttaatgtgttattatcttggcagtttcttttctccattacttttcttttttaatttaacctctatgccagatgctatctatttgtttaccttgataaaatttgggttaataggattagctgcatgctattcttttcatagattatatccaaaaatcagtgctttcttgatgatttccatctcagttttttatagcttaatgagcttcttgacaagtcaaatggaactaaattcttggttagatgttttcattcttcttccacttgttatacttggattaaataaacttatcacagaaaataaaaccagaacttattatctttcgatatcattattattcattcaaaattactactttggctacatgattgctcttttttgtattctttacgccttagtttgtcttttacgtctcaatgattttaacaaaatgtttatcgcttttgttaggtttacagctgtgtcaatatgtgctgctttaacaagtgctctagtaatacttcctacctatctagatttgtcaacttatggagagaatctatccccgataaaacagttagttacgaacaatgcttggtttttggatatacctgctaagctctcaataggagtgtacgatactaccaagtttaatgctctgcctatgatttacgtaggattatttcccctaatgcttagtgttatttattttactttagaaagtatccctttaaaaataaaattagccaatgcctgcttgttaacttttattataataagtttttacctacagccacttgatcttttttggcaggggatgcactcaccaaatatgtttttgcatcgctacgcttggtctttttccatagttatcctattactcgcatgtgagactctctctcgactaaaagaagtgactcaaataaaagcaggttttgcttttattttcctcattatactgacatctcttccttatagcttttctcaacaatataattttctacctttaactctttttttacttagtgtttttttattattaggttatactatttcactattttcgtttagaaattctcaaatcccatctacttttatttctgctttcatacttatctttagccttcttgaatcagggttaaacacctactaccagcttcaaggaattaataaggagtggggattcccatcacgacagatatataatagtcaattaaaggatattaacaaccttgtcaactctgtgtcaaaaaatagtcaacctttttttagaatggaaaggctacttccccaaacagggaacgatagcatgaaatttaattattacggcatttcacaattttcctctgtaagaaatagactatctagttctttattggatcgattgggatttcagtctaaaggcacaaatttaaaccttagataccaaaacaatactattattatggacagtctacttggtataaaatataatcttagcgaaggacctccaaataaatttggatttacaaaactaaaaactagcgggaatactactctttatcaaaatcactatagtagccctttagctatattaacacgtaatgtttacaaagatgtcaacctaaatgtcaatacccttgataaccaaaccaaattacttaaccaactaagtgggaaatctttaacctattttaacttacagccagctcaacttatttctggtgctaatcaatttaacggacaaatatctgcacaagcttctgattatcaaaactccgttacccttaattatcaaattaacatccctaaacatagtcaactctatgttagcatacccaatattatattttcaaatcctgatgctaaagagatgcgtattcagacagataatcataatttcatatatactacagataacgcttactctttttttgatttaggatatttcgccgatgccaaagttgctacattttcgtttgtttttccaaaaaataaacaaattagttttaaggaacctcatttttatagtttgtctattgaatcttaccttgaagcaatgaatagcattaaacaaaaaaatgttcatacttacgctaaaagtaatacggtaatcactgattataattcaaaaacgaaaggttctcttatttttacacttccttacgataaaggttggtcagcacaaaaagatgggaaaaatcttccagtcaaaaaagcacaaggaggatttctatcagttactattcctaaaggaaagggacgtgttatccttacctttattcctaatggttttaaattagggttatctctatcttgtgtaggaattatcgcttatatgcttttgtataagtacatagatataaagtctaaattactttag

SEQ ID NO: 604 - protein, 858 aa, Streptococcus pyogenes
MKNNNKWIIAGLASFLFPLSIIFIILLSMGIYYNSDKTILASDAFHQYVIFAQNFRNIMHGSDSFFYTFTSGLGINFYALMCYYLGSFFSPLLFFFNLTSMPDAIYLFTLIKFGLIGLAACYSFHRLYPKISAFLMISISVFYSLMSFLTSQMELNSWLDVFILLPLVILGLNKLITENKTRTYYLSISLLFIQNYYFGYMIALFCILYALVCLLRLNDFNKMFIAFVRFTAVSICAALTSALVILPTYLDLSTYGENLSPIKQLVTNNAWFLDIPAKLSIGVYDTTKFNALPMIYVGLFPLMLSVIYFTLESIPLKIKLANACLLTFIIISFYLQPLDLFWQGMHSPNMFLHRYAWSFSIVILLLACETLSRLKEVTQIKAGFAFIFLIILTSLPYSFSQQYNFLPLTLFLLSVFLLLGYTISLFSFRNSQIPSTFISAFILIFSLLESGLNTYYQLQGINKEWGFPSRQIYNSQLKDINNLVNSVSKNSQPFFRMERLLPQTGNDSMKFNYYGISQFSSVRNRLSSSLLDRLGFQSKGTNLNLRYQNNTIIMDSLLGIKYNLSEGPPNKFGFTKLKTSGNTTLYQNHYSSPLAILTRNVYKDVNLNVNTLDNQTKLLNQLSGKSLTYFNLQPAQLISGANQFNGQISAQASDYQNSVTLNYQINIPKHSQLYVSIPNIIFSNPDAKEMRIQTDNHNFIYTTDNAYSFFDLGYFADAKVATFSFVFPKNKQISFKEPHFYSLSIESYLEAMNSIKQKNVHTYAKSNTVITDYNSKTKGSLIFTLPYDKGWSAQKDGKNLPVKKAQGGFLSVTIPKGKGRVILTFIPNGFKLGLSLSCVGIIAYMLLYKYIDIKSKLL

SEQ ID NO: 605 - DNA, 864 bp, Streptococcus pyogenes
ttggaaggtattttttatgcacttattcccatgtttacatggggaagcattggatttgttagtaacaaaattggaggaaaaccttcgcaacaaactctaggaatgacttttggggctttattattttcattagctgtttggttaattgttagacctgagatgacactgcaactttggctttttggaatattgggtggttttatctggtcaattggtcaaactggtcaatttcatgccatgcaatacatgggagtctccgttgccaatcctttgtcaagtggctctcaacttgttctgggaagtttgattggtgtcctcgtttttcatgaatggacaagacctatgcaatttgtagtaggaagtctagcactattacttctgattgttggtttttacttttctagtaaacaagatgatgctaatgcacaagtcaatcaccttcataatttttcaaaaggatttagggcgctcacttattcaacaattggttacgtgatgtatgctgtattatttaataacatcatgaaatttgaagttttgtcagtcattttacccatggcagtaggtatggttttaggagctataactttcatgtcatttaaaatttccattgaccagtatgtgattaaaaatagcgttgttggattactttggggcattgggaatatttttatgcttttagctgcatcaaaagcaggacttgctattgcctttagtttctcacaattaggtgctatcatttcgattgtcggaggcattttattcctaggcgaaaccaaaaccaaaaaagaaatgcgttgggttgtcacaggaattatttgttttatcgtaggtgctattttattaggtgtggtcaaatcttaa

SEQ ID NO: 606 - protein, 287 aa, Streptococcus pyogenes
MEGIFYALIPMFTWGSIGFVSNKIGGKPSQQTLGMTFGALLFSLAVWLIVRPEMTLQLWLFGILGGFIWSIGQTGQFHAMQYMGVSVANPLSSGSQLVLGSLIGVLVFHEWTRPMQFVVGSLALLLLIVGFYFSSKQDDANAQVNHLHNFSKGFRALTYSTIGYVMYAVLFNNIMKFEVLSVILPMAVGMVLGAITFMSFKISIDQYVIKNSVVGLLWGIGNIFMLLAASKAGLAIAFSFSQLGAIISIVGGILFLGETKTKKEMRWVVTGIICFIVGAILLGVVKS

SEQ ID NO: 607 - DNA, 915 bp, Streptococcus pyogenes
atgaccaaagtcagaaaagccattattcctgctgcaggtctaggaacacgttttttacctgctaccaaagctcttgccaaagagatgttgcccatcgttgataaaccaaccatccagtttatcgtcgaagaagcgctaaaatctggcatcgaggaaatccttgtggtgaccggaaaagctaaacgctctatcgaggaccattttgattcaaactttgaattagaatacaacctccaagctaaggggaaaaatgaactgttgaaattagtggatgaaaccactgccattaaccttcattttatccgtcaaagccacccaagagggctgggagatgctgtcttacaagccaaagcctttgtgggcaatgaaccctttgtggtcatgcttggagatgacttaatggacattacaaatgcatccgctaaacctctcaccaaacaactcatggaggactatgacaagacgcatgcatccactatcgctgtgatgaaagttcctcatgaagatgtgtctagctatggggttatcgctcctcaaggcaaggctgtcaagggcctttacagtgtagacacctttgttgaaaaaccacaaccagaagatgcgcctagtgatttggctattattggtcgttacctcctaacccctgaaatttttggtattttggaaagacagacccctggagcaggtaacgaagtgcaactcacagatgctatcgataccctcaataaaactcagcgtgtctttgcacgagaatttaaaggcaatcgttacgatgttggggataaatttggattcatgaaaacatctatcgactatgccttagaacacccacaggtcaaagaggacttgaaaaattacattatcaaactaggaaaagctttggaaaaaagtaaagtaccaacacattcaaagtaa

SEQ ID NO: 608 - protein, 304 aa, Streptococcus pyogenes
MTKVRKAIIPAAGLGTRFLPATKALAKEMLPIVDKPTIQFIVEEALKSGIEEILVVTGKAKRSIEDHFDSNFELEYNLQAKGKNELLKLVDETTAINLHFIRQSHPRGLGDAVLQAKAFVGNEPFVVMLGDDLMDITNASAKPLTKQLMEDYDKTHASTIAVMKVPHEDVSSYGVIAPQGKAVKGLYSVDTFVEKPQPEDAPSDLAIIGRYLLTPEIFGILERQTPGAGNEVQLTDAIDTLNKTQRVFAREFKGNRYDVGDKFGFMKTSIDYALEHPQVKEDLKNYIIKLGKALEKSKVPTHSK

SEQ ID NO: 609 - DNA, 1338 bp, Streptococcus pyogenes
ttgacattaccccttatttatattagaatatcgaggtccctgtctttcaaggaaattaaaaaagaaagaggtgtaattgtgcctatttttaaaaaaactttaattgttttatcctttatttttttgatatctatcttgatttatctaaatatgtatctatttggaacatcaactgtaggaatttatggagtaatattaataacctatctagttattaaacttggattatctttcctttatgagccatttaaaggaaagccacatgactataaagttgctgctgtaattccttcttataatgaagatgccgagtcattattagaaactcttaaaagtgtgttagcacagacctatccgttatcagaaatttatattgttgatgatgggagttcaaacacagatgcaatacaattaattgaagagtatgtaaatagagaagtggatatttgtcgaaacgttatcgttcaccgttcccttgtcaataaaggaaaacgccatgctcaagcgtgggcatttgaaagatctgacgctgacgtttttttaaccgtagattcagatacttatatctatccaaatgccttagaagaactcctaaaaagcttcaatgatgagacagtttatgctgcaacaggacatttgaatgctagaaacagacaaactaatctattaacgcgacttacagatatccgttacgataatgcctttggggtggagcgtgctgctcaatcattaacaggtaatattttagtttgctcaggaccattgagtatttatcgacgtgaagtgattattcctaacttagagcgctataaaaatcaaacattcctaggtttacctgttagcattggggatgatcgatgtttaacaaattatgctattgatttaggacgcactgtctaccaatcaacagctagatgtgatactgatgtacctttccaattaaaaagttatttaaagcaacaaaatcgatggaataaatctttttttagagaatctattatttctgttaaaaaaattctttctaatcccatcgttgccttatggactattttcgaaatcgttatgtttatgatgttgattgtcgcaattgggaatcttttgtttaatcaagctattcaattagaccttattaaactttttgcctttttatccatcatctttatcgttgctttatgtcgtaatgttcattatatgatcaaacatcctgctagttttttgttatctcctctgtatggaatattacacttgtttgtcttacagcccctaaaactttattctttatgcaccattaaaaatacggaatggggaacacgtaaaaaggtcactatttttaaataa

SEQ ID NO: 610 - protein, 445 aa, Streptococcus pyogenes
MTLPLIYIRISRSLSFKEIKKERGVIVPIFKKTLIVLSFIFLISILIYLNMYLFGTSTVGIYGVILITYLVIKLGLSFLYEPFKGKPHDYKVAAVIPSYNEDAESLLETLKSVLAQTYPLSEIYIVDDGSSNTDAIQLIEEYVNREVDICRNVIVHRSLVNKGKRHAQAWAFERSDADVFLTVDSDTYIYPNALEELLKSFNDETVYAATGHLNARNRQTNLLTRLTDIRYDNAFGVERAAQSLTGNILVCSGPLSIYRREVIIPNLERYKNQTFLGLPVSIGDDRCLTNYAIDLGRTVYQSTARCDTDVPFQLKSYLKQQNRWNKSFFRESIISVKKILSNPIVALWTIFEIVMFMMLIVAIGNLLFNQAIQLDLIKLFAFLSIIFIVALCRNVHYMIKHPASFLLSPLYGILHLFVLQPLKLYSLCTIKNTEWGTRKKVTIFK

SEQ ID NO: 611 - DNA, 543 bp, Streptococcus pyogenes
atgataaaaaaagaaaatattcctaatctattaactcttgttcgaatcgcaatgattcctttctttctttttattacttcctcatctaataaggtggggtggcatatttttgcagctgtgatttttgcaattgccagttttaccgattatctagatgggtatcttgcgcgtaagtggcatgtagccagtaattttggaaagtttgccgatcctctagcagataagatgcttgtcatgagtgcctttatcatgttagttggacttggcttagttcctgcgtgggtgtcagctgttattatttgccgagaattggcagtaactggtcttcgattactacttgttgaaaccggaggaaaggtccttgcagctgctatgccgggaaaaatcaaaacagcgacacaaatgttgtctattattttattactttgccattggatattcctaggaaacgtcttactctatattgctctttttttcactatttattctggatatgattattttaaaggagcaagctttctttttaaggatacgtttaaataa

SEQ ID NO: 612 - protein, 180 aa, Streptococcus pyogenes
MIKKENIPNLLTLVRIAMIPFFLFITSSSNKVGWHIFAAVIFAIASFTDYLDGYLARKWHVASNFGKFADPLADKMLVMSAFIMLVGLGLVPAWVSAVIICRELAVTGLRLLLVETGGKVLAAAMPGKIKTATQMLSIILLLCHWIFLGNVLLYIALFFTIYSGYDYFKGASFLFKDTFK

SEQ ID NO: 613 - DNA, 921 bp, Streptococcus pyogenes
ttgctctttttttcactatttattctggatatgattattttaaaggagcaagctttctttttaaggatacgtttaaataacatgtcagctattattgaacttaaaaaagttacatttaattaccataaagaccaagaaaaaccaacattagatggcgtatcgtttcatgtgaaacaaggtgagtggctgtctatcattggccataatggatctggtaaatcaacgactattcggttaattgatggattattggaaccagaatcagggtctattattgttgatggagatctactaaccataactaatgtttgggaaattcgtcataaaattggtatggtctttcaaaaccctgataatcagtttgttggagcaactgttgaagatgatgttgcttttgggcttgaaaataaaggtattgcacatgaagatataaaagagagggttaatcatgctttagagttagtcggcatgcagaactttaaagaaaaagaaccagcccgtttatctggtggccaaaaacagcgcgtagctattgcaggtgcagttgctatgaagcctaaaattattattttagatgaagctactagtatgcttgaccctaaaggacgattagagttaatcaaaactataaaaaacatccgtgacgactaccagctgactgttatttccattactcatgacttagatgaagttgctcttagtgatagagttttagtgatgaaagatggtcaagtggaatcaacatcaacaccagaacaattatttgcaagaggggatgaactactccaattaggtcttgatatcccttttacaacatctgttgtacagatgcttcaagaagaaggttatcctgttgactatggatatctcacagaaaaggaattagaaaatcagttatgtcaattaatctccaaaatgtaa

SEQ ID NO: 614 - protein, 306 aa, Streptococcus pyogenes
MLFFSLFILDMIILKEQAFFLRIRLNNMSAIIELKKVTFNYHKDQEKPTLDGVSFHVKQGEWLSIIGHNGSGKSTTIRLIDGLLEPESGSIIVDGDLLTITNVWEIRHKIGMVFQNPDNQFVGATVEDDVAFGLENKGIAHEDIKERVNHALELVGMQNFKEKEPARLSGGQKQRVAIAGAVAMKPKIIILDEATSMLDPKGRLELIKTIKNIRDDYQLTVISITHDLDEVALSDRVLVMKDGQVESTSTPEQLFARGDELLQLGLDIPFTTSVVQMLQEEGYPVDYGYLTEKELENQLCQLISKM

SEQ ID NO: 615 - DNA, 615 bp, Streptococcus pyogenes
atgtttaagaaagaaaatttaaaacaacgttattttaattttggattagtagcgttagctctaacaatattagccatcatttttgccttctcaagtaaaaatgctgatactaagtcttatgctaagaagtcagaaagtaaaatggtaacaatcgacaaggctccaaaaaataatcatgctattactaaagaagaaagcaaagaaaaagcaaagagcattgcttcggagcctattcccacagtagaaaactctgtagctccgacagtaacagaggaagtaccggttgttcagcaagaagtgactcaaactgttcagcaggtatcttcagtagcctataatccaaacaatgtggtactttccaatggaaatactgctggtattgtaggaagtcaagcggcggcacagatggcagcagcaacaggtgttccacaatcaacttgggaacatataattgcgcgtgaatctaatggaaatcctaacgcagctaatgcttctggggcatcagggttgttccagacaatgccaggttggggttctacagcaacggttgaagatcaagtcaatgcagccttgaaagcctatagtgcacaaggtttatcagcttggggttactaa

SEQ ID NO: 616 - protein, 204 aa, Streptococcus pyogenes
MFKKENLKQRYFNFGLVALALTILAIIFAFSSKNADTKSYAKKSESKMVTIDKAPKNNHAITKEESKEKAKSIASEPIPTVENSVAPTVTEEVPVVQQEVTQTVQQVSSVAYNPNNVVLSNGNTAGIVGSQAAAQMAAATGVPQSTWEHIIARESNGNPNAANASGASGLFQTMPGWGSTATVEDQVNAALKAYSAQGLSAWGY

SEQ ID NO: 617 - DNA, 1977 bp, Streptococcus pyogenes
atgaaaaaatttcgttttgaaaccattcatttgattatgatgggattgattttatttggactgctggcactttgtgtcagtattatgcaatcaaaaatattaatattattagctatttttctcgttttgctatttgttgttgctcttttatggtatcaaaaagaagcttatcaattatcagacttagctcatattgagctcttaaatgaacaaacagaagataacctaaaaacgctacttgataatatgcctgttggagtagttcaatttgatcaagagaccaacgctgtagaatggtataatccttatgcagaattaatttttacaactgaagagggttttatacaaaacggtttgattcagcaaattattacggaaaaacgtcgtgaagatatttctcaaacatttgaagtttctggtaataaatacacttcttatattgatgtatcatcaggaattttttatttttttgatagctttgtgggaaacaggcaattagctgatgctagtatgttaagaccggttgttggcattatttcggttgataattatgatgatatcactgatgatttatcagatgcagatacctcaaaaattaattcatttgtagctaacttcattgatgagtttatggagtcaaaacggattttttaccgtcgtgttaatatggatcgctactatttctttacagactttaaaacattaaatgatttgatggataataaattttctgtcttagaagagtttcgtaaagaagctcaagatgctcagcgccctttaacactcagcataggaatttcttttggtgaagaaaatcatagccagattggacaggtagctcttgagaatcttaatattgcgcttgttcgtggtggtgatcagattgtcattcgtgaaaatgcggatcatacgaatccaatttatttcgggggagggtctgtttctacagttaaacgttcaagaacacgtacccgtgctatgatgacagctatttcagatcgaatcaagatggtggacaatgtttttattgttggacataggaaacttgatatggatgcactaggttcagctgttggtatgcaatttttcgcaggtaacattattgaaaatagttttgccgtttacaatccagatgagatgagtccagatattgaaagggctattgagcgattgcaggctgacggaaagactcgtctaatcagtgtttctcaagcaatgggtttagtgactccaagatcacttttagtaatggttgaccattctaagatatctttaacactttctaaagaattttatgaacagtttcaaaatgttattgtagttgatcatcacagaagagatgatgattttcctgataatgctatcttaacttttattgaaagtggagcaagtagtgctgcggagctcgtcactgagttaattcaatttcaaaatgctaaaaaatgtttaaataagatccaagccagtgttttaatggcaggtattatgcttgatactaaaaatttttctacgcgagtgacaagtcgtacctttgatgtcgctagttacttaagaagcaaaggaagtgatagtgttgaaattcaaaatatatccgcaacagattttgaagaatataagcaaataaatgaaattattttacaaggagaacgtcttggtgacagtatcattgtagctgcaggagaaaaaaatcatctttatagcaatgttattgctagtaaagctgcagatacgatactgtcaatggctcacgttgaggctagctttgtattagttgaaacagcttctcataagattgctatttcagctagaagtcgtagtaaaatcaatgttcaacgtgtgatggaaaaattaggtggaggaggccactttaatcttgctgcctgtcagttaacggatatcagtcttccccaagcgaagtacttattattgaaaactattaatatgacaatgaaagaaacaggagaagtagaatcatga

SEQ ID NO: 618 - protein, 658 aa, Streptococcus pyogenes
MKKFRFETIHLIMMGLILFGLLALCVSIMQSKILILLAIFLVLLFVVALLWYQKEAYQLSDLAHIELLNEQTEDNLKTLLDNMPVGVVQFDQETNAVEWYNPYAELIFTTEEGFIQNGLIQQIITEKRREDISQTFEVSGNKYTSYIDVSSGIFYFFDSFVGNRQLADASMLRPVVGIISVDNYDDITDDLSDADTSKINSFVANFIDEFMESKRIFYRRVNMDRYYFFTDFKTLNDLMDNKFSVLEEFRKEAQDAQRPLTLSIGISFGEENHSQIGQVALENLNIALVRGGDQIVIRENADHTNPIYFGGGSVSTVKRSRTRTRAMMTAISDRIKMVDNVFIVGHRKLDMDALGSAVGMQFFAGNIIENSFAVYNPDEMSPDIERAIERLQADGKTRLISVSQAMGLVTPRSLLVMVDHSKISLTLSKEFYEQFQNVIVVDHHRRDDDFPDNAILTFIESGASSAAELVTELIQFQNAKKCLNKIQASVLMAGIMLDTKNFSTRVTSRTFDVASYLRSKGSDSVEIQNISATDFEEYKQINEIILQGERLGDSIIVAAGEKNHLYSNVIASKAADTILSMAHVEASFVLVETASHKIAISARSRSKINVQRVMEKLGGGGHFNLAACQLTDISLPQAKYLLLKTINMTMKETGEVES

SEQ ID NO: 619 - DNA, 2304 bp, Streptococcus pyogenes
ttgaacagtatgtccattttaggagaaaatatgttagaagaattgaaaacacttattaaaaatccaaaattaatgattacaatgattggtgtggccctagtgcctgccttatataatttatcctttctaggctcaatgtgggatccttatggtcgggtcaatgaccttcccattgctgttgttaatcatgataagcctgcaaagagagctgataagtcattgacaattgggaatgatatggtggacaagatgtctaaaagtaaagatttagagtatcattttgtctcagctaagcaagctcaagagggacttaaagaaggtgattattatatggttattactttacccgaagatctttctcaacgggcagcaaccttattaaatcccgaaccccaaaaattaactatccgttaccaaacgagtaaaggacatggaatggtcgctgctaagatgggggaaacagcgatggctaagctgaaagagtctgtttcgcaaaacattacgaagacttatacctcagcagtttttagcagtatgacagacctccaatcaggattaaaagaagcctcagctggaagtcaagcacttgcttcaggagcgaagactgctcaggcggggagtcaaacactttcgacgaacttagcagccttaacgggtgctagccaacagtttcaacaaggtactggtcgattgacatcaggtttgactacctatacagatggtgtcaaccaagtcaagaatgggttaggaacattatcaacggacatccccaattatctgaatggggtttctaggttatcccagggagcttctcagcttaatcagggtctttcacagttgacacaagcaacaacactttctgacgagaaagctaagggaattcaatccttaattgtaggactaccagtcctaaatcaaggcattcagcaactaaatacagagctatcaacattgcaaccccctaaccttaatgctgatgagttaggtaatagcttaggagctatcgctcaagctgccaaacaagtcattgctgaagagactgccgctcagaatgaagaattatcggctctccaagctactagcgtttaccaatcattaactgctgaacaacaaggagagttagctgcggccctcagtcaatctgataaaagtcagaccgtatctgcagcccaaactattttaagttctgttcaaactttgtcaacaagtttacagtctctctctcaagaagatcagtcaaaacagttggagcaacttaaggaagctgttgcacagattgctaatcaatccaatcaagctttgccgggagcaagttctgctttaactgaattatcaacgggattagcaaaggtaaatggtagcttaaatcaacaagttctaccaggaagtaatcaattgacaacaggattagcacaattaaacaggtataatactgccattggttctggggtaataaaactctcagaaggtgccaatgccttgtcatccaagtccggagaattactagatggtagccatcaattatcagaaggtgctactaaactagctgatggtagttctcaattgagtcagggtggtcatcaattaacgagcggattgactgaattatcaacaggattgtcaaccttaaatggttccttagccaaagcctctcagcagttatcgcttgtttctgtgactgataaaaatgctaaagctgtcgcaaaacctcttgtgttaaatgagaaagacaaagatggtgttaagacgaatgggatcgggatggcaccttatatgattgctgtttctctaatggttgtggccctttcaaccaacgtcatttttgctaattctttatctggtcgtccggtcaaagataaatgggattgggctaaacaaaaatttgttattaatggttttatttcgactatgggatccattgttctctacttagctattcaattattagggtttgaagcccgttatggtatggaaaccttaggatttattatgctaagtggttggacgtttatggctcttgtcacagctttggtcggttgggatgatcgatatggctcttttgcttctttggtcatgttattgcttcaggttggctcttcaggtggctcttaccccattgagttaagtggagcattcttccaaaagttacatcctttcttaccaatgacttatgtggtatctggtttacgacaaaccatttcattatcaggtcatattggagtagaagtgaaagtcttaactggtttcttactggcatttatggtattagcactactcatttatcgtcccaagaaaacagtctaa

SEQ ID NO: 620 - protein, 767 aa, Streptococcus pyogenes
MNSMSILGENMLEELKTLIKNPKLMITMIGVALVPALYNLSFLGSMWDPYGRVNDLPIAVVNHDKPAKRADKSLTIGNDMVDKMSKSKDLEYHFVSAKQAQEGLKEGDYYMVITLPEDLSQRAATLLNPEPQKLTIRYQTSKGHGMVAAKMGETAMAKLKESVSQNITKTYTSAVFSSMTDLQSGLKEASAGSQALASGAKTAQAGSQTLSTNLAALTGASQQFQQGTGRLTSGLTTYTDGVNQVKNGLGTLSTDIPNYLNGVSRLSQGASQLNQGLSQLTQATTLSDEKAKGIQSLIVGLPVLNQGIQQLNTELSTLQPPNLNADELGNSLGAIAQAAKQVIAEETAAQNEELSALQATSVYQSLTAEQQGELAAALSQSDKSQTVSAAQTILSSVQTLSTSLQSLSQEDQSKQLEQLKEAVAQIANQSNQALPGASSALTELSTGLAKVNGSLNQQVLPGSNQLTTGLAQLNRYNTAIGSGVIKLSEGANALSSKSGELLDGSHQLSEGATKLADGSSQLSQGGHQLTSGLTELSTGLSTLNGSLAKASQQLSLVSVTDKNAKAVAKPLVLNEKDKDGVKTNGIGMAPYMIAVSLMVVALSTNVIFANSLSGRPVKDKWDWAKQKFVINGFISTMGSIVLYLAIQLLGFEARYGMETLGFIMLSGWTFMALVTALVGWDDRYGSFASLVMLLLQVGSSGGSYPIELSGAFFQKLHPFLPMTYVVSGLRQTISLSGHIGVEVKVLTGFLLAFMVLALLIYRPKKTV

SEQ ID NO: 621 - DNA, 843 bp, Streptococcus pyogenes
atggtttcatttatttcaagagtttttaaaggcatgattattgcactaggttttattttacctggtgtatccggtggtgttctcgcagccattttaggaatctatgagcgaatgatttcctttttagctcatatgagggataactttattgaaaatgtcttatttttcttaccagtaggaattggtggtattttaggtattgctctcttttctttccccgttgagtttttgcttaagcactatcaagttagcgtcttatggggatttgctggcgctattgtcggcactattcctagtctgattaaggagtcaaccaagcagtctcaaagagacaaagctgactggctatggctagtccttacctttgttatttcaggactaggtctttacttcttaaatgacttaatcggtaccttaccagctaactttttaacctttattttagcaggtgccttaattgctttaggagtactggtccctggactaagcccgtcaaatctcttacttatcttaggactctatggtcctatgttaatagggttcaaatctttggatttattagggactttcttacctattgctatcggaggagtcctagccatcttggctttttctaaaagtatggattatgctttacagcaccatcattcaaaagtttaccactttatcattggtattgtattatccagcacgctattaattcttattccaaatagtagtagtcccgaatccatttcctacagtcatgcaggtatcttaacctggcttatggcctttgtgttatttgctcttggtatttggctcggactttggatgagtcaattagaagaaaaatacaaataa

SEQ ID NO: 622 - protein, 280 aa, Streptococcus pyogenes
MVSFISRVFKGMIIALGFILPGVSGGVLAAILGIYERMISFLAHMRDNFIENVLFFLPVGIGGILGIALFSFPVEFLLKHYQVSVLWGFAGAIVGTIPSLIKESTKQSQRDKADWLWLVLTFVISGLGLYFLNDLIGTLPANFLTFILAGALIALGVLVPGLSPSNLLLILGLYGPMLIGFKSLDLLGTFLPIAIGGVLAILAFSKSMDYALQHHHSKVYHFIIGIVLSSTLLILIPNSSSPESISYSHAGILTWLMAFVLFALGIWLGLWMSQLEEKYK

SEQ ID NO: 623 - DNA, 942 bp, Streptococcus pyogenes
atgattaagaaaacaacctataagaaaaaagttaaatatgtcattagtagaggggccaagaaagttggcctactccacgctctaagaagtatttcaagagaaaaatatgcagagaagatttcggcttctctgctttatggcattctctctagtattgctgtgaattttttcttccagcctgggcatgtttattcaagtggagcaactggtctagcacaggttttttcagctcttagtcatcgtcttttaggctatgattttcccatcgcctttgcgttttatttgattaatattcctttgcttattttagcttggtataaaattgggcatcaatttaccatttttacctttatcacagtcagcatgagttctttctttattcaaatcatgcctcaagtgacgctgacgactgatcctcttatcaatgctatttttggtggtttggttatgggaatgggaattggtacaggtctcaaatcacgtatctctagtggggggactgatattgtcagtttgacccttaggaaacgaacaggcaaggatgtgggcagtctctcattgatggttaatggtgcaattttagcctttgcagggattttatttggctggcagtacgccctttattctatggtctctatctttgtatcaagtcgtgttacggatgccattttcaccaagcaaaagaaaatgcaggcaactattgttaccagccatccagagcgtgtgattcatatgatccataaacgtctgcatcgcggagtgaccagtatcaacgacgcagaagggacttacaagcatgaacaaaaagcagttttgattaccattttgacatgtgaagaatacccagaattcaaatggctgatgttaaaaacagacccacaagcctttgtttcagtggctgagaatgttagaattatcggtcgttttgtggaagatgattaa

SEQ ID NO: 624 - protein, 313 aa, Streptococcus pyogenes
MIKKTTYKKKVKYVISRGAKKVGLLHALRSISREKYAEKISASLLYGILSSIAVNFFFQPGHVYSSGATGLAQVFSALSHRLLGYDFPIAFAFYLINIPLLILAWYKIGHQFTIFTFITVSMSSFFIQIMPQVTLTTDPLINAIFGGLVMGMGIGTGLKSRISSGGTDIVSLTLRKRTGKDVGSLSLMVNGAILAFAGILFGWQYALYSMVSIFVSSRVTDAIFTKQKKMQATIVTSHPERVIHMIHKRLHRGVTSINDAEGTYKHEQKAVLITILTCEEYPEFKWLMLKTDPQAFVSVAENVRIIGRFVEDD

SEQ ID NO: 625 - DNA, 873 bp, Streptococcus pyogenes
atggcacatcacgataaattgactaaactactaaaactgtttttgattgccctaggtgtagccatttataccttcggttttgttaattttaacatggctaatgctttggctgaaggtggtgtggcaggaataaccttgattttacacgcgcattttgggattaatcctgcttactcttctctcttatttaatcttccactttttattttaggggcaaagatttttgggaagcgttctttggctctaaccatctatggaacagttctgatgtccgcttttatctggatgtggcaaaaagttcctatcgaacttggcttggaaaatgacatgatgttggtggctgtagtggcaggtctcttttcagggattgggagtggcattgtttttcgctatggtgcaaccacaggtggaacggatattattggtcgcattgcagaagaaaaatttggagctaagctaggtcaaactttgcttttggtggatgctcttgtattgacagcttcgttgacttatgtggatttaaaacacatgctttacactttggtggcaagctttgtttttagccaaatgattagtgtggttcaaaatggtggttacactatccgtggaatgattattattaccaagcattcagaggctgccgctcaagctatcctaaccgaaatcaatcgtggagtgacttacttgaaaggtcaaggagcttactctggtaatgattacaatatcatgtatgtgaccttgaacccaactgaagttcgggaagtcaaacgtattttagctggtttggatccagatgcctttatctccattattgatgtggacgaagttattagctctgattttaaaattcgccgaagaaattatgataaataa

SEQ ID NO: 626 - protein, 290 aa, Streptococcus pyogenes
MAHHDKLTKLLKLFLIALGVAIYTFGFVNFNMANALAEGGVAGITLILHAHFGINPAYSSLLFNLPLFILGAKIFGKRSLALTIYGTVLMSAFIWMWQKVPIELGLENDMMLVAVVAGLFSGIGSGIVFRYGATTGGTDIIGRIAEEKFGAKLGQTLLLVDALVLTASLTYVDLKHMLYTLVASFVFSQMISVVQNGGYTIRGMIIITKHSEAAAQAILTEINRGVTYLKGQGAYSGNDYNIMYVTLNPTEVREVKRILAGLDPDAFISIIDVDEVISSDFKIRRRNYDK

SEQ ID NO: 627 - DNA, 576 bp, Streptococcus pyogenes
ttgatatttaattttaaggagaatatagtgaaaaagaaattagttttagctaccttatgtctatcaatgggtgctgtgagtgttagagcggaaagtgattttgggaatgctaatgaaatcgggctaggtttttatggtagtgatgactatactaaccaacctgctttaacaggagaccaagcgaaaataggcttcagaaacgattggaaagatgctagagattttggagtaaaaccaataaatctgggagatagtaaaatcgaagtaaaaacaaatccgggagctcttgtaagagtttccttgacaacgggtgaaacaaccaatagtatatgggagttaacaagtgtatcttcctcaatgagtaacggtatctacactaacacttataaaataaagccaactattgcaaattcttcaggaattgcaacgttcgatttagcgaactcaggaaaatacgacaaggaaaaaagtgaaattataaagagtactgagagtaatgcaaagaaaggtgatacttactcagttactacaagtatagatggatggacaataggttatggagaatggactgtgtga

SEQ ID NO: 628 - protein, 191 aa, Streptococcus pyogenes
MIFNFKENIVKKKLVLATLCLSMGAVSVRAESDFGNANEIGLGFYGSDDYTNQPALTGDQAKIGFRNDWKDARDFGVKPINLGDSKIEVKTNPGALVRVSLTTGETTNSIWELTSVSSSMSNGIYTNTYKIKPTIANSSGIATFDLANSGKYDKEKSEIIKSTESNAKKGDTYSVTTSIDGWTIGYGEWTV

SEQ ID NO: 629 - DNA, 1221 bp, Streptococcus pyogenes
atgcaagagtttttaaaccttcctaagcagattcagctgaggcaactggtacgctttgtgaccattaccttaggcagtagtatctttccctttatggccatgtattatacgacttactttggtacgttttggacaggcctcttaatgatgattaccagtttgatgggatttgttggaactttatacggtgggcatctgtcagatgctcttggtcgcaaaaaagtcattatgattgggtcagtaggaacaacactaggctggtttctgactattttagctaatttgcctaatgcggctattccttggttaacctttgcgggtattttattggtagagattgcttctagtttttatggtcctgcctatgaagctatgttgattgatttgactgatgagagtaatcgtcgatttgtttacaccatcaattattggtttatcaatattgccgtcatgtttggtgcagggctatctgggcttttttatgaccatcattttttagccttgttagtagccttattactcgtcaatgtactttgttttggcgttgcttactactgttttgatgaaactagaccagaaacacacgcttttgaccatggtaaaggattactggcgagttttcagaactaccgtcaggtgtttcatgatcgtgcctttgtcttgtttaccttaggtgccatcttttctggtagtatctggatgcagatggataactatgtgccagtccatttgaaactgtattttcagccaacggctgtattaggtttccaagtaactagttctaaaatgttatcattaatggttttaactaatacattgctgattgtccttttcatgacagtagtaaataaattaacggaaaaatggaaactattacctcagcttgtggttggttctttactatttactctagggatgctcttgtcatttacctttacgcagttctatgctatctggttatcagttgttttgttaacttttggggaaatgataaatgtttctgctagtcaagtcctacgtgctgatatgatggatcattcccaaataggatcttatacaggttttgtgtcaatggcacaacccctaggtgctattttggctagtctactagtatctgtcagccattttacaggtcctttaggcgtgcaatgcttatttgcagtcattgctttgctagggatttattttacggttgtttctgcaaaaatgaaaaaggtgtaa

SEQ ID NO: 630 - protein, 406 aa, Streptococcus pyogenes
MQEFLNLPKQIQLRQLVRFVTITLGSSIFPFMAMYYTTYFGTFWTGLLMMITSLMGFVGTLYGGHLSDALGRKKVIMIGSVGTTLGWFLTILANLPNAAIPWLTFAGILLVEIASSFYGPAYEAMLIDLTDESNRRFVYTINYWFINIAVMFGAGLSGLFYDHHFLALLVALLLVNVLCFGVAYYCFDETRPETHAFDHGKGLLASFQNYRQVFHDRAFVLFTLGAIFSGSIWMQMDNYVPVHLKLYFQPTAVLGFQVTSSKMLSLMVLTNTLLIVLFMTVVNKLTEKWKLLPQLVVGSLLFTLGMLLSFTFTQFYAIWLSVVLLTFGEMINVSASQVLRADMMDHSQIGSYTGFVSMAQPLGAILASLLVSVSHFTGPLGVQCLFAVIALLGIYFTVVSAKMKKV

SEQ ID NO: 631 - DNA, 2025 bp, Streptococcus pyogenes
atgggaaaatttgaacaggatgctaagagtcttctaactgctattggtggtaaagaaaacatcaaggttgtcacacactgtgcaacgcgtatgcgttttgttttgaatgataataataaggcaaatgtcaaagagattgaaaaaatctctgtagttaaagggacatttaccaatgctgggcagtttcaggtaatcattggtaatgatgttccagttttttataatgactttacagctgtttctagtattgaaggggtgtctaaagaagctgccaaatcagcagctaaaagtaatcaaaatgccttacaacgggtgatgaccatgttggctgagattttcacacctattattccggcgattattgttggggggcttattttaggtttccgtaatattttggagagtgtgccttttgaatttcttgggcagcaggtcgaaaaagggaaattagtttttgatgcagctggggatcctgtttggaatacgattgtgagggtatctcctttctggtcaggggttaaccatttcttgtggttaccaggggaagctattttccacttcttaccagttgggattacttggtctgtgacgcgtaagatgggaaccactcaaattttagggattgtccttggtatctgtttggtgtcaccacaattattgaatgcctatgcggtggcaggaacgcctgctgctgagattgccaaaaactgggtttgggattttggtttctttaccattaatcgtattgggtatcaggcacaggttattccagcccttttagctggtctgtcccttgcttatcttgaaattttctggcgtaaacggattccagaagtggtttcaatgatttttgtgccattcctttctttgattccagctttgattttagcgcatacggtattggggccaatcggttggactattggtaaagggatttcctttgttgtgttagctggattgactggtcctgttaaatggctattcggtgctatctttggtgccttgtatgctccgctagttattactggtttacatcacatgacaaatgccattgatacccaattaattgctgatactgcaactcgtacaactggtttgtggccaatgattgctctttcaaatatcgctcaagggtcagccgtttttgcttactatttaatgaatcgtcatgaagaacgtgaggctgaaatatcgcttcctgcagcaatttctgcttaccttggggtaactgagcctgccttatttggggttaatgttaaatacgtttatccctttgtagccggaatgattggctcaggtattgcgggtctcttatcaacaacctttaatgttcaggcaaattctattggtgttggtggtttaccaggtttcatggctatcaatgtgaagtacatgattccattcttcatctgtatggcagtagccattgtggtgccgatgtttttaaccttctttttccgtaaatcacatatcatgactaagacagaagatgaagctaaactacctgagacacccgtttcggatgctcctgtagcaactgctccacataagactatgcaaggaacagttatcactttaacaagccctttaacgggtgaagttaaagcgttgtctgaagctgttgatcctgtctttgcacagggagttatgggccaaggtgctcttcttcaaccgacagaaggggtgttagtagcgccttgtgatgctgaagtatcggtcttgttcccaactaaacacgctatttgtttggtgacgactgaaggtttggaattattgatgcatattggcatggatacggttaacttagatggtcaaggatttgaagctttggtgaagcaaggtgatcaggttaaggctggacaaacattgattcaatttgatatagcagcaatttctgaagctggatacgccactgaaacgcctcttgtggtgactaatcaagatgtttttacggtaactgttgaaggtagtttaccgcgtcagattaaggttaatgataagttagcagtagcggtgaaaaagtag

SEQ ID NO: 632 - protein, 674 aa, Streptococcus pyogenes
MGKFEQDAKSLLTAIGGKENIKVVTHCATRMRFVLNDNNKANVKEIEKISVVKGTFTNAGQFQVIIGNDVPVFYNDFTAVSSIEGVSKEAAKSAAKSNQNALQRVMTMLAEIFTPIIPAIIVGGLILGFRNILESVPFEFLGQQVEKGKLVFDAAGDPVWNTIVRVSPFWSGVNHFLWLPGEAIFHFLPVGITWSVTRKMGTTQILGIVLGICLVSPQLLNAYAVAGTPAAEIAKNWVWDFGFFTINRIGYQAQVIPALLAGLSLAYLEIFWRKRIPEVVSMIFVPFLSLIPALILAHTVLGPIGWTIGKGISFVVLAGLTGPVKWLFGAIFGALYAPLVITGLHHMTNAIDTQLIADTATRTTGLWPMIALSNIAQGSAVFAYYLMNRHEEREAEISLPAAISAYLGVTEPALFGVNVKYVYPFVAGMIGSGIAGLLSTTFNVQANSIGVGGLPGFMAINVKYMIPFFICMAVAIVVPMFLTFFFRKSHIMTKTEDEAKLPETPVSDAPVATAPHKTMQGTVITLTSPLTGEVKALSEAVDPVFAQGVMGQGALLQPTEGVLVAPCDAEVSVLFPTKHAICLVTTEGLELLMHIGMDTVNLDGQGFEALVKQGDQVKAGQTLIQFDIAAISEAGYATETPLVVTNQDVFTVTVEGSLPRQIKVNDKLAVAVKK

SEQ ID NO: 633 - DNA, 2337 bp, Streptococcus pyogenes
atgagatttctagaacttttacaaaagaaattttttcctaaagcatatcaggaaaaacaattcttaatgcatcaaaaaacgcgtttaacgccacaacacaatcaaaagcagtattcgccaaatgccaatcatttggactcatcagctaccaaaaactcagaacaagaccctgcaacagctctgcaacgcagtagagcctacgaaggaagccctaaaagtcggcccgcttggttgcaaaagctggaagctgttttgccgtctcctcaacgtccaattcggcgtttttggcgccgctatcacatcggaaaactgctaatgattctgattggaactcttgtcttactcttaggatcatacttgttttacttatcaaaaacagctaaagtatctgatttacaagatgccttgaaggctacaacggttatttatgatcacaaaggagagtatgcaggcagtttatctggtcaaaaagggagttatgttgagctcaacgctatttcagatgatcttgagaatgctgttattgccactgaggataggactttttacagtaatagcggtattaatcttaaacgcttcttattggcggtagttacggcgggccgctttggaggtggctcaacgattacacagcaactggctaaaaatgcttatctctcacaagatcagacaattaaacgaaaggcccgagagttttttttggcgttagagttgaccaaaaaatacagtaaaaaagatattcttactatgtaccttaacaactcctactttggaaatggagtttggggagttgaagatgccagtcaaaaatattttggaaccacagctgctaacttaacactggatgaagctgccacattagcaggtatgctcaaaggacctgaaatatataacccttaccattctctaaaaaatgctactcaccgtagagatactgttttaggagcgatggttgatgccaaaaagattacccaaacaaaagctcagcaagctagagcagtagggctaaaaaatcgcttagctgatacttatgttggtaagacagatgactacaaatacccatcctactttgatgctgttattagtgaagcaatagcaacttatggtctttcagaaaaagacattgttaataatggatacaaagtttacactgagctagatcaaaattaccaaactggcatgcagacgacttttaacaacgatgaactatttcctgtttcagcttatgacggtagctctgctcaagcagctagtgttgctttagatcctaaaacaggaggtgttagaggtctgattggtcgtgtgaatagtagtgaaaatccgactttcagaagttttaactatgcgactcaagcaaaacgtagtcccgcatcaacaatcaaaccactcgtggtttacgcgccagccgttgcttcaggatggtcaattgaaaaagaactaccaaataccgttcaagatttcgatggctatcagccacataattatggaaattatgaatcagaagatgttcctatgtatcaagcattagcaaactcttataatattccagcagtttctacattgaacgatatcggaatcgataaagcctttacctatggtaaaacatttgggttagatatgagctctgccaaaaaagagttgggggtagctttaggtggcagcgtgacaaccaatccattggagatggctcaggcatatgctgcctttgccaataatggagtaatccatcctgcgcacttgattaaccggattgaaaatgccaggggtgaagtgcttaaaacctttactgataaggctaaacgtgttgtcagccagtctgttgcagataagatgacagccatgatgctaggtaccttttcaaatggaacagcagtcaatgctaacgtatatggctatacactagctggtaaaacagggacgacagaaaccaacttcaatcccgacttagcaggcgatcagtgggttattggttatacgccagatgttgttattagtcaatgggtaggatttaatcagaccgatgaaaatcattatctaacggattcaagtgcaggcacggcctcagctatttttagcactcaggcatcttacattttgccttataccaagggcagccaatttcatgtagataatgcctacgctcaaaatggtatttcagctgtttatggagtcaatgaaacaggtaatcaatcaggagttgatactcaatctattattgatggtttaagaaaatcagcacaagaagcttcgcaatcactatcaaaagcagtcgatcagtcagggttacgtgataaagcccaatctatttggaaagagattgttgactattttagatag

SEQ ID NO: 634 - protein, 778 aa, Streptococcus pyogenes
MRFLELLQKKFFPKAYQEKQFLMHQKTRLTPQHNQKQYSPNANHLDSSATKNSEQDPATALQRSRAYEGSPKSRPAWLQKLEAVLPSPQRPIRRFWRRYHIGKLLMILIGTLVLLLGSYLFYLSKTAKVSDLQDALKATTVIYDHKGEYAGSLSGQKGSYVELNAISDDLENAVIATEDRTFYSNSGINLKRFLLAVVTAGRFGGGSTITQQLAKNAYLSQDQTIKRKAREFFLALELTKKYSKKDILTMYLNNSYFGNGVWGVEDASQKYFGTTAANLTLDEAATLAGMLKGPEIYNPYHSLKNATHRRDTVLGAMVDAKKITQTKAQQARAVGLKNRLADTYVGKTDDYKYPSYFDAVISEAIATYGLSEKDIVNNGYKVYTELDQNYQTGMQTTFNNDELFPVSAYDGSSAQAASVALDPKTGGVRGLIGRVNSSENPTFRSFNYATQAKRSPASTIKPLVVYAPAVASGWSIEKELPNTVQDFDGYQPHNYGNYESEDVPMYQALANSYNIPAVSTLNDIGIDKAFTYGKTFGLDMSSAKKELGVALGGSVTTNPLEMAQAYAAFANNGVIHPAHLINRIENARGEVLKTFTDKAKRVVSQSVADKMTAMMLGTFSNGTAVNANVYGYTLAGKTGTTETNFNPDLAGDQWVIGYTPDVVISQWVGFNQTDENHYLTDSSAGTASAIFSTQASYILPYTKGSQFHVDNAYAQNGISAVYGVNETGNQSGVDTQSIIDGLRKSAQEASQSLSKAVDQSGLRDKAQSIWKEIVDYFR

SEQ ID NO: 635 - DNA, 330 bp, Streptococcus pyogenes
atgactaaaaaggagattgacatgattaaaattggattgttttgtgcagcaggattttcaaccggtatgttggtgaacaacatgaaagtagctgctgaaaaaaaaggcattgattgtcagattgaagcctatgctcaagggaaattagcggactatgcaccattacttgatgtggcacttttaggcccacaggttgcctatactctggataaatcagaagctatttgtaaagacaatgatatccctattgcagttatcccaatggctgattatggaatgttagacggcaacaaggtgcttgatttagcccttagccttgttaaagaatag

SEQ ID NO: 636 - protein, 109 aa, Streptococcus pyogenes
MTKKEIDMIKIGLFCAAGFSTGMLVNNMKVAAEKKGIDCQIEAYAQGKLADYAPLLDVALLGPQVAYTLDKSEAICKDNDIPIAVIPMADYGMLDGNKVLDLALSLVKE

SEQ ID NO: 637 - DNA, 1305 bp, Streptococcus pyogenes
atggcaaaaatgaatatgcaaaacatcatcaagccaatcatgacatttgtgaatatgcgcggcatcattgccttaaaagacggtatgttagccattttacctttgaccgttgtggggagtcttttcctgattgctgggcagattcctttccaaggggttaatgatgccattgctagtgtgtttggtgctgactggacagaaccctttatgcaggtttaccatggaacatttgctattatggggttgatttcctgttttgcaattggctattcttatgctaaaaactcaggtgttgaacctctcccttcaggggttctatccttgtcagccttctttattttattgagatcatcttatgttccagcagaaggtgaagctattggagatgctatcagtaaggtttggtttggtggtcaagggattattggtgctattgtgattggtttaacggtcggagctgtttacacaacatttatccgtcgtcatatcgtcattaaaatgccagatcaagtgccacaagccatcgccaaacagtttgaagccatgattccagcctttgtgatctttaccttgtcaatgcttgtgtatattattgccaagtcagtaacaggtggtggcacctttattgaaatgatttatgatgtcattcaggtaccgctgcaagggttaacgggttctctttatggcgcactaggtattgccttctttatttcctttctttggtggtttggcgtgcatgggcaatctgtggtcaatggaattgtcactgctcttctcttatcaaatctagatgccaataaggccttgatggcagcaggtgagttatccctagacaagggtgcccatattgtaacccaacaatttttagactctttcttgattctatcaggttctggcattacctttggtttagtggtagctatgatctttgcggctaaatccaaacaatacaaggctttaggcaaggttgcagccttcccagccctctttaatgttaatgaaccagtcgtctttggttttccaattgtgatgaatccagtcatgttcttgccatttatcttggttccggtcttggcagctctcacagtttatggcgccattgctattggtttcatgcagccctttgcaggagtgacccttccgtggtcaacaccagccattatctcagggttcatggttggtggctggcaaggagctattgtgcaaattcttatactcatcatgtcaacgttggtgtacttcccattctttaaaatccaagataatatggcttatcaaaatgaacaagctagtgaagagtcatga

SEQ ID NO: 638 - protein, 434 aa, Streptococcus pyogenes
MAKMNMQNIIKPIMTFVNMRGIIALKDGMLAILPLTVVGSLFLIAGQIPFQGVNDAIASVFGADWTEPFMQVYHGTFAIMGLISCFAIGYSYAKNSGVEPLPSGVLSLSAFFILLRSSYVPAEGEAIGDAISKVWFGGQGIIGAIVIGLTVGAVYTTFIRRHIVIKMPDQVPQAIAKQFEAMIPAFVIFTLSMLVYIIAKSVTGGGTFIEMIYDVIQVPLQGLTGSLYGALGIAFFISFLWWFGVHGQSVVNGIVTALLLSNLDANKALMAAGELSLDKGAHIVTQQFLDSFLILSGSGITFGLVVAMIFAAKSKQYKALGKVAAFPALFNVNEPVVFGFPIVMNPVMFLPFILVPVLAALTVYGAIAIGFMQPFAGVTLPWSTPAIISGFMVGGWQGAIVQILILIMSTLVYFPFFKIQDNMAYQNEQASEES

SEQ ID NO: 639 - DNA, 846 bp, Streptococcus pyogenes
gtgagcgaaattagaaaagaggacaagcatatgaatctacttggatcaagacgggttttttctaaaaaatgtcggctagtaaaattttcaatggtagctcttgtatcagccacaatggctgtaacaacagtcacacttgaaaatactgcactggcacgacaaacacaggtctcaaatgatgttgttctaaatgatggcgcaagcaagtacctaaacgaagcattagcttggacattcaatgacagtcccaactattacaaaaccttaggtactagtcagatcactccagcactctttcctaaagcaggagatattctctatagcaaattagatgagttaggaaggacgcgtactgctagaggtacattgacttatgccaatgttgaaggtagctacggtgttagacaatctttcggtaaaaatcaaaaccccgcaggctggactggaaaccctaatcatgtcaaatataaaattgaatggttaaatggtctatcttatgtcggagatttctggaatagaagtcatctcattgcagatagtctcggtggagatgcactcagagtcaatgccgttacagggacacgtacccaaaatgtaggaggtcgtgaccaaaaaggcggcatgcgctataccgaacaaagagctcaagaatggttagaagcaaatcgtgatggctatctttattatgaagctgctccaatctataacgcagacgagttgattccaagagctgtcgtggtatcaatgcaatcttctgataataccatcaacgagaaagtattagtttacaacacagctaatggctacaccattaactaccataacggtacacctactcagaaataa

SEQ ID NO: 640 - protein, 281 aa, Streptococcus pyogenes
MSEIRKEDKHMNLLGSRRVFSKKCRLVKFSMVALVSATMAVTTVTLENTALARQTQVSNDVVLNDGASKYLNEALAWTFNDSPNYYKTLGTSQITPALFPKAGDILYSKLDELGRTRTARGTLTYANVEGSYGVRQSFGKNQNPAGWTGNPNHVKYKIEWLNGLSYVGDFWNRSHLIADSLGGDALRVNAVTGTRTQNVGGRDQKGGMRYTEQRAQEWLEANRDGYLYYEAAPIYNADELIPRAVVVSMQSSDNTINEKVLVYNTANGYTINYHNGTPTQK

SEQ ID NO: 641 - DNA, 1197 bp, Streptococcus pyogenes
atgaataaaaagaaattaggtgtcagattattaagtcttttagcattaggtggatttgttcttgctaacccagtatttgccgatcaaaactttgctcgtaacgaaaaagaagcaaaagatagcgctatcacatttatccaaaaatcagcagctatcaaagcaggtgcacgaagcgcagaagatattaagcttgacaaagttaacttaggtggagaactttctggctctaatatgtatgtttacaatatttctactggaggatttgttatcgtttcaggagataaacgttctccagaaattctaggatactctaccagcggatcatttgacgctaacggtaaagaaaacattgcttccttcatggaaagttatgtcgaacaaatcaaagaaaacaaaaaattagacactacttatgctggtaccgctgagattaaacaaccagttgttaaatctctccttgattcaaaaggcattcattacaatcaaggtaacccttacaacctattgacacctgttattgaaaaagtaaaaccaggtgaacaatcttttgtaggtcaacatgcagctacaggatgtgttgctactgcaactgctcaaattatgaaatatcataattaccctaacaaagggttgaaagactacacttacacactaagctcaaataacccatatttcaaccatcctaagaacttgtttgcagctatctctactagacaatacaactggaacaacatcttacctacttatagcggaagagaatctaacgttcaaaaaatggcgatttcagaattgatggctgatgttggtatttcagtagacatggattatggtccatctagtggttctgcaggtagctctcgtgttcaaagagccttgaaagaaaactttggctacaaccaatctgttcaccaaatcaaccgtggcgactttagcaaacaagattgggaagcacaaattgacaaagaattatctcaaaaccaaccagtatactaccaaggtgtcggtaaagtaggcggacatgcctttgttatcgatggtgctgacggacgtaacttctaccatgttaactggggttggggtggagtctctgacggcttcttccgtcttgacgcactaaacccttcagctcttggtactggtggcggcgcaggcggcttcaacggttaccaaagtgctgttgtaggcatcaaaccttag

SEQ ID NO: 642 - protein, 398 aa, Streptococcus pyogenes
MNKKKLGVRLLSLLALGGFVLANPVFADQNFARNEKEAKDSAITFIQKSAAIKAGARSAEDIKLDKVNLGGELSGSNMYVYNISTGGFVIVSGDKRSPEILGYSTSGSFDANGKENIASFMESYVEQIKENKKLDTTYAGTAEIKQPVVKSLLDSKGIHYNQGNPYNLLTPVIEKVKPGEQSFVGQHAATGCVATATAQIMKYHNYPNKGLKDYTYTLSSNNPYFNHPKNLFAAISTRQYNWNNILPTYSGRESNVQKMAISELMADVGISVDMDYGPSSGSAGSSRVQRALKENFGYNQSVHQINRGDFSKQDWEAQIDKELSQNQPVYYQGVGKVGGHAFVIDGADGRNFYHVNWGWGGVSDGFFRLDALNPSALGTGGGAGGFNGYQSAVVGIKP

SEQ ID NO: 643 - DNA, 1389 bp, Streptococcus pyogenes
gtgagactaatcaaaaaaacctttttggtcatcaatggcttaattattgtagtggttacctctattttgttagtgctttattttgcaatgccaatttattacaccaaagtcaaagacaaagaagttaagtgtgaatttgaccaaacaagcaagcaaatcaaaggcaaaacggtaaccgagattagagatatcctaacaaaaaaaatcaacaaagataatatttggtacagcttagtagacagtgataaccaactgctctatccttccttgcagctcctagacggcgtcagtgaaagcaaagacagtcaaaatgttaatatcgtcaccacctttgacaactcttattctaatgttaaggtgatgagtcaaaaagtaaccctacgcgatggaaaaaaaatgacattgcttgggcaatcttcacttcaacccgtaacagatgctagcaaagttctccttgacctctacccgtcactattgattttttcagtgaccgtagggagtattgtcgcctacttatatagtaggacttctagccggcgtatccttagcatgtcacaaaccgccaaaaaaatggtcaacctagaaccaaacttaacgtgtaccattcacggcaaagatgaaatagcaatgttggctagtgatattaaccgtttgtatgcgagtctttcaacgagcatcaaatccttgcaaaaagagtatgaaaaagcttctgattcagaaagagagaaatctgagtttttacgcatgacatcgcacgagctaaagacaccaatcactagtgttatcggaatgattgatggaatgctctataatgttggtgactttgcagatcgtgacaaatatttgcgaaagtgccgagacgtccttgaagggcaagcccaactggttcaatccattttatctttatctaagattgaaaccctagcttctcaaaatcaagaactgttttcactaaaaagcagcctagaagaagaaatggaagtctttctcgtcttatcagaactaaaacacctcaaagtgactatcaatctcgaagaacaattcgtcaaagccaataaagtatatctactaaaggcgattaaaaatattattgacaatgcctttcactataccaaatcaggcggccaagtgatgattcaactaaaagacaaccaactagtgattaaaaatgaagcagagacattattgacacaacagcagatgaaacagttattccaaccgttttatcgaccagattatagtcgtaacaggaaagacggtggtacaggattggggctgtttatcacccaccagattcttgatcagcatcatctggcttatcgctttgttgttcttgatcaaagatggatggtatttacgattgattttccatcccatcatgacgattga

SEQ ID NO: 644 - protein, 462 aa, Streptococcus pyogenes
MRLIKKTFLVINGLIIVVVTSILLVLYFAMPIYYTKVKDKEVKCEFDQTSKQIKGKTVTEIRDILTKKINKDNIWYSLVDSDNQLLYPSLQLLDGVSESKDSQNVNIVTTFDNSYSNVKVMSQKVTLRDGKKMTLLGQSSLQPVTDASKVLLDLYPSLLIFSVTVGSIVAYLYSRTSSRRILSMSQTAKKMVNLEPNLTCTIHGKDEIAMLASDINRLYASLSTSIKSLQKEYEKASDSEREKSEFLRMTSHELKTPITSVIGMIDGMLYNVGDFADRDKYLRKCRDVLEGQAQLVQSILSLSKIETLASQNQELFSLKSSLEEEMEVFLVLSELKHLKVTINLEEQFVKANKVYLLKAIKNIIDNAFHYTKSGGQVMIQLKDNQLVIKNEAETLLTQQQMKQLFQPFYRPDYSRNRKDGGTGLGLFITHQILDQHHLAYRFVVLDQRWMVFTIDFPSHHDD

SEQ ID NO: 645 - DNA, 1626 bp, Streptococcus pyogenes
atgaagaaaaggaaattgttagcagtaacactattaagtaccatactcttaaacagtgcagtgccattagttgttgctgatacctccttgcgtaatagcacatcatccactgatcagcctactacagcagatactgatacggatgacgagagtgaaacaccaaaaaaagacaaaaaaagcaaggaaacagcgtcgcagcacgacacccaaaaagaccataagccatcacacactcacccaacccccccttcaaatgatactaagcagaccgatcaggcatcatctgaagctactgacaaaccaaataaagacaaaaacgacaccaagcaaccagacagcagtgatcaatccaccccatctcccaaagaccagtcgtctcaaaaagagtcacaaaacaaagacggccgacctaccccatcacctgatcagcaaaaagatcagacacctgataaaacaccagaaaaatcagctgataaaacccctgaaaaaggaccagaaaaagcaactgataaaacaccagagccaaatcgtgacgctccaaaacccatccaacctcctttagcagctgctcctgtctttataccttggagagaaagtgacaaagacctgagcaagctaaaaccaagcagtcgctcatcagcggcttacgtgagacactggacaggtgactctgcctacactcacaacctgttgtcacgccgttatgggattactgctgaacagctagatggttttttgaacagtctaggtattcactatgataaagaacgcttaaacggaaagcgtttattagaatgggaaaaactaacaggactagacgttcgagctatcgtagctattgcaatggcagaaagctcactaggtactcagggagttgctaaagaaaaaggagccaatatgtttggttatggcgcctttgacttcaacccaaacaatgccaaaaaatacagcgatgaggttgctattcgtcacatggtagaagacaccatcattgccaacaaaaaccaaacctttgaaagacaagacctcaaagcaaaaaaatggtcactaggccagttggataccttgattgatggtggggtttactttacagatacaagtggcagtgggcaaagacgagcagatatcatgaccaaactagaccaatggatagatgatcatggaagcacacctgagattccagaacatctcaagataacttccgggacacaatttagcgaagtgcccgtaggttataaaagaagtcagccacaaaacgttttgacctacaagtcagagacctacagctttggccaatgcacttggtacgcctataatcgtgtcaaagagctaggttatcaagtcgacaggtacatgggtaacggtggcgactggcagcgcaagccaggttttgtgaccacccataaacctaaagtgggctatgtcgtctcatttgcaccaggccaagcaggagcagatgcaacctatggtcacgttgctgttgtagagcaaatcaaagaagatggttctatcttaatttcagagtcaaatgttatgggactaggcaccatttcctatcggacgttcacagctgagcaggctagtttgttgacctatgtcgtaggggacaaactcccaagaccataa

SEQ ID NO: 646 - protein, 541 aa, Streptococcus pyogenes
MKKRKLLAVTLLSTILLNSAVPLVVADTSLRNSTSSTDQPTTADTDTDDESETPKKDKKSKETASQHDTQKDHKPSHTHPTPPSNDTKQTDQASSEATDKPNKDKNDTKQPDSSDQSTPSPKDQSSQKESQNKDGRPTPSPDQQKDQTPDKTPEKSADKTPEKGPEKATDKTPEPNRDAPKPIQPPLAAAPVFIPWRESDKDLSKLKPSSRSSAAYVRHWTGDSAYTHNLLSRRYGITAEQLDGFLNSLGIHYDKERLNGKRLLEWEKLTGLDVRAIVAIAMAESSLGTQGVAKEKGANMFGYGAFDFNPNNAKKYSDEVAIRHMVEDTIIANKNQTFERQDLKAKKWSLGQLDTLIDGGVYFTDTSGSGQRRADIMTKLDQWIDDHGSTPEIPEHLKITSGTQFSEVPVGYKRSQPQNVLTYKSETYSFGQCTWYAYNRVKELGYQVDRYMGNGGDWQRKPGFVTTHKPKVGYVVSFAPGQAGADATYGHVAVVEQIKEDGSILISESNVMGLGTISYRTFTAEQASLLTYVVGDKLPRP

SEQ ID NO: 647 - DNA, 927 bp, Streptococcus pyogenes
atgaatattagaaataagattgaaaatagtaaaacactactatttacatcccttgtagccgtggctctactaggagctacacaaccagtttcagccgaaacgtatacatcacgcaattttgactggtctggagatgactggtctggagatgactggcctgaagatgactggtctggagatggtttgtctaaatatgaccggtctggagttggtttgtctcaatatggctggtctaaatatggctggtctagcgataaagaagaatggcctgaagattggcctgaagatgactggtctagcgataaaaaagatgagacagaagataaaacgagaccaccatatggagaagcattaggtacagggtatgaaaaacgtgatgattggggaggacctggtacggtggcaactgacccttacactccaccatatggaggagcattaggtacagggtatgaaaaacgtgatgattggggaggacctggtacggtggcaactgacccttacactccaccatatggaggagcattaggtacagggtatgaaaaacgtgatgattggagaggacctggacatattcctaaacctgagaacgaacaatcaccaaacccacttcatattcctgaacctcctcagattgagtggcctcagtggaatggctttgatggattatcatttggcccctctgattggggccaatctgaggacacccctccaagtgaacctcgtgtgccagaaaaaccgcaacatactcctcaaaaaaatccacaagaatcagattttgatagagggttttcagctggcttgaaagcaaaaaactcaggtagaggtattgattttgaaggtttccagtatggtggctggtcagacgaatataaaaaaggttacatgcaagccttcggtacaccatatacaccatcagcaacgtaa

SEQ ID NO: 648 - protein, 308 aa, Streptococcus pyogenes
MNIRNKIENSKTLLFTSLVAVALLGATQPVSAETYTSRNFDWSGDDWSGDDWPEDDWSGDGLSKYDRSGVGLSQYGWSKYGWSSDKEEWPEDWPEDDWSSDKKDETEDKTRPPYGEALGTGYEKRDDWGGPGTVATDPYTPPYGGALGTGYEKRDDWGGPGTVATDPYTPPYGGALGTGYEKRDDWRGPGHIPKPENEQSPNPLHIPEPPQIEWPQWNGFDGLSFGPSDWGQSEDTPPSEPRVPEKPQHTPQKNPQESDFDRGFSAGLKAKNSGRGIDFEGFQYGGWSDEYKKGYMQAFGTPYTPSAT

SEQ ID NO: 649 - DNA, 822 bp, Streptococcus pyogenes
atgatattgaaacgtcgaacgatggttttatggcaactgggtatcgccatttctctcattcttagtattctagccttaaacctttatttctataggacgcctttggaaaccaatgcagctttacgcaacctcgctccttccttaaaccatctttttgggacagatggtttaggtagggatatgtttgtcagaacgattaaagggctttatttctctttacaagtcggcttattaggcgcccttatgggagtctttcttgcgaccgtttttggagtgcttgcaggtctaggaaatagccttattgataaaataatagcctggttggttgatttgtttattggtatgcctcatttgatttttatgattctcatttcttttgttgttgggaaaggggctcaaggggttatcattgcaacagctgttacccattggccctctctagcaaggcttatccgcaatgaagtctatgatctaaagaataaagcctttgtccagctctctaaaagcatgggaaaaacgccttattatattgtgaggcatcatatcctgcctttgattgcttctcaaattttcattgggtttatcctcttatttccgcacgtcatcttgcatgaagcatccatgactttcttaggatttggcctttctgccgaacaaccttcggttggtatcattttgtcagaggcagctaagcatatctctcttggcaattggtggttggtgatttttccaggcctttatcttattttggttgtcaatgcctttgatactatcggagaatctttaaagaaactcttttaccctcaaacggatcatttttag

SEQ ID NO: 650 - protein, 273 aa, Streptococcus pyogenes
MILKRRTMVLWQLGIAISLILSILALNLYFYRTPLETNAALRNLAPSLNHLFGTDGLGRDMFVRTIKGLYFSLQVGLLGALMGVFLATVFGVLAGLGNSLIDKIIAWLVDLFIGMPHLIFMILISFVVGKGAQGVIIATAVTHWPSLARLIRNEVYDLKNKAFVQLSKSMGKTPYYIVRHHILPLIASQIFIGFILLFPHVILHEASMTFLGFGLSAEQPSVGIILSEAAKHISLGNWWLVIFPGLYLILVVNAFDTIGESLKKLFYPQTDHF

SEQ ID NO: 651 - DNA, 978 bp, Streptococcus pyogenes
gtgaaacgtactaccattattatcatctggaaaatcatcagatgtgtcacgcttatttttggggtatctgttttgaccttcgttttgttaaaacaatctccagtagatccagtcatggcaagtgtcaattatgacacatcactaacccctgctcagtacaaagcgattgctcaccactatggcttggataagccagctctagtccaatattttatttggttgaaaaatgtgatacagggagatttagggacctcgctcgtttatcggcaacctgttagtgatattattagatcacgggcaggtgcttctttcatacttatgggactctcttggatcttatcgggtcttattggatttatcttaggaacgttatccgctttccatcaagggaaattacttgaccgagttgtcaggtggttttcataccttcagatatcagtaccaacgttttggattggactcatttttttattaatcttttctgtccagctggggtggttcccgattggtatttcttccccgataggcactttgagtcaagatattacgttagctgatcgagttaagcaccttatgttacctgttttcacgctaagtattctaggcattgccaatgtcacccttcatacgagaactaaaatgatgtcggtgctttctagtgaatatgtcttatttgccagagcgcgtggggaaacacagtggcaaatttttaaacatcattgccttagaaatgctatcgtaccagctattacactgcatttttcctattttggagaattgtttggaggatctgttcttgctgagcaagttttctcatatcctggcttagggtctaccctcactgaagcaggacttaaaagtgatacaccgctccttctagctattgtgatgatagggacattatttgtttttgcgggcaatcttattgcggatattttaaatagcatcatcaatccacagttaaggagaaaagtatga

SEQ ID NO: 652 - protein, 325 aa, Streptococcus pyogenes
MKRTTIIIIWKIIRCVTLIFGVSVLTFVLLKQSPVDPVMASVNYDTSLTPAQYKAIAHHYGLDKPALVQYFIWLKNVIQGDLGTSLVYRQPVSDIIRSRAGASFILMGLSWILSGLIGFILGTLSAFHQGKLLDRVVRWFSYLQISVPTFWIGLIFLLIFSVQLGWFPIGISSPIGTLSQDITLADRVKHLMLPVFTLSILGIANVTLHTRTKMMSVLSSEYVLFARARGETQWQIFKHHCLRNAIVPAITLHFSYFGELFGGSVLAEQVFSYPGLGSTLTEAGLKSDTPLLLAIVMIGTLFVFAGNLIADILNSIINPQLRRKV

SEQ ID NO: 653 - DNA, 2187 bp, Streptococcus pyogenes
atgaaaacatcattcaagcaactgtttcgtttcgaattttggcaaaaatttgggaaatgtcttatggtcgttattgctgtcatgccagcggctggtttaatgatcagtatcggaaactctattccaatgattaaccacgactcagcatttttggcatctctaggcaacattatcgctcaaattggttgggctgttattgttaaccttcacttgctatttgccttggccattggtggtagttgggctaaagaaagagctggaggggcctttgcctcagggcttgcttttgtcttgatcaatcggataacaggtgctttttatggcgtgtctagtactatgctagctgatccagaagcaaaaatcacaagcctccttggcactcaaatgatcgttaaagattatttcaccagtgtcttggaatctccagctttaaacacaggggtttttgttgggattattgcagggttcgtaggagcaacggcctataacaaatactataattaccgtaaacttcctgaagttttgaccttctttaatgggaagcgttttgtaccatttgtcgttattttacgttctatttttgtagcccttattttggttgttgtttggccggtgatccagtctgggattaacagttttgggatgtggattgcctcttcacaagattcagctccaatcctagccccattcctatatggtaccttggaacgtctcttgttgccatttggtcttcaccacatgttgacgatcccaatgaactatacagctcttggtggaacttatgaggtcatgacaggtgcagcagcggggacaaaagtatttggtcaagaccctttgtggcttgcttgggtaactgaccttgttcaccttaaaggatcagacgcttcagcctatagtcacttaatggatagtgtgactccagctcgtttcaaagtaggacaaatgattggagctaccggaacattgatgggggttgccttagccatgtaccgtaatgtggatgccgataaaaaacacacatacaaaatgatgttcatctcagcagcggcagcggtctttttgacaggggtaactgagccacttgagtacctatttatgtttgcagcaatgccactttacatcgtctatgcccttgttcaaggagcttcatttgccatggcagaccttgtgaatctccgtgttcactcatttggaaatatagagctactaacccgcacccctatggctcttaaagcaggcctaggcatggatgtgattaactttgtttgggtttctgtcctctttgcagttatcatgtactttattgcagatatgatgatcaagaaaatgcatctcgcaacagctggccgtttaggcaactacgatgccgatatactgggtgaccgtaacactcaaacaagacctacccaagtagcagatagcaactctcaagtcgtgcaaatcgttaatctccttggtggggcaggcaatattgatgatgttgatgcttgtatgacgcgcttacgagtgacggtcaaagaccccgctaaggttggtgctgaggacgattggaaaaaagctggcgctataggcttgatccaaaaaggcaacggcgttcaagcggtctatggccctaaagcagatattttgaaatcagatattcaagatttgctggactcaggtgctcttattccagaagtcaatatgtcacagctcactagcaaaccgactcccgcaaaagattttaaacacgtgacagaagatgtgctatcagtggcagacgggatggttctcccaatcacaggtgtaaaagaccaggtgtttgcggctaagatgatgggagatgggtttgcggttgaaccaacccatggtaatatctatgcacccgtagctggccttgtgaccagtgtctttccgaccaagcatgcctttggtttactgacagataatggtcttgaagtgctggtgcacgtgggacttgataccgtcgccttaaatggtgtgcctttttcagtcaaagtctcagaagggcaacgggttcatgcaggtgacctattagtcgtagcagatcttgctgctattaaatcagcagagcgtgaaacaatcattgttgttgcttttaccaacacaacagagatccaagatgtgaccttgacatctttaggagctcagcctgctaagactaaagtagctaccgtagaactttaa

SEQ ID NO: 654 - protein, 728 aa, Streptococcus pyogenes
MKTSFKQLFRFEFWQKFGKCLMVVIAVMPAAGLMISIGNSIPMINHDSAFLASLGNIIAQIGWAVIVNLHLLFALAIGGSWAKERAGGAFASGLAFVLINRITGAFYGVSSTMLADPEAKITSLLGTQMIVKDYFTSVLESPALNTGVFVGIIAGFVGATAYNKYYNYRKLPEVLTFFNGKRFVPFVVILRSIFVALILVVVWPVIQSGINSFGMWIASSQDSAPILAPFLYGTLERLLLPFGLHHMLTIPMNYTALGGTYEVMTGAAAGTKVFGQDPLWLAWVTDLVHLKGSDASAYSHLMDSVTPARFKVGQMIGATGTLMGVALAMYRNVDADKKHTYKMMFISAAAAVFLTGVTEPLEYLFMFAAMPLYIVYALVQGASFAMADLVNLRVHSFGNIELLTRTPMALKAGLGMDVINFVWVSVLFAVIMYFIADMMIKKMHLATAGRLGNYDADILGDRNTQTRPTQVADSNSQVVQIVNLLGGAGNIDDVDACMTRLRVTVKDPAKVGAEDDWKKAGAIGLIQKGNGVQAVYGPKADILKSDIQDLLDSGALIPEVNMSQLTSKPTPAKDFKHVTEDVLSVADGMVLPITGVKDQVFAAKMMGDGFAVEPTHGNIYAPVAGLVTSVFPTKHAFGLLTDNGLEVLVHVGLDTVALNGVPFSVKVSEGQRVHAGDLLVVADLAAIKSAERETIIVVAFTNTTEIQDVTLTSLGAQPAKTKVATVEL

SEQ ID NO: 655 - DNA, 417 bp, Streptococcus pyogenes
ttgttttctttgcgttttgtaacggctaggacaccagctgttgtcatcactgctactgctgctgctgtaaagaatgggttggcttgctcaccagttgctggtagacgtctgtggttgttggctacaggtgtcttagccatattgccattgcggcgttctggcgtttggttagcttctttgtcagcaggtttttctgcagctggagttacctctttgctcttttctggagctttttcgcctggttggcctgcttcgccttctgggctcttttctggagctttttcgcctggttggcctgcttcaccttgtgggcctgctgggccttgctcacctggtttgcctgcctcaccttgtgggcctgctgggccttgggcgcccgtttcacctttttcaccttgtgggcctactggaccctga

SEQ ID NO: 656 - protein, 138 aa, Streptococcus pyogenes
MFSLRFVTARTPAVVITATAAAVKNGLACSPVAGRRLWLLATGVLAILPLRRSGVWLASLSAGFSAAGVTSLLFSGAFSPGWPASPSGLFSGAFSPGWPASPCGPAGPCSPGLPASPCGPAGPWAPVSPFSPCGPTGP

SEQ ID NO: 657 - DNA, 1323 bp, Streptococcus pyogenes
atgaaaaattacttatctattggagtgattgcactgctgtttgcattaacatttggaacagtcaagtcggtccaagctattgctgggtatggatggctaccagaccgtccacctatcaataacagccagttagttgttagtatggccggtatcgttgaaggtaccgataaaaaagtttttataaatttttttgaaatcgatctaacatcacaacctgctcacggaggaaagacagagcagggcttaagtccaaaatcaaaaccatttgctacagataatggcgcaatgccacataaacttgaaaaagctgacttattaaaagctattcaaaaacagctgatcgctaacgttcacagtaacgacggctactttgaggtcattgattttgcaagcgatgcaaccattactgatcgaaacggcaaggtctactttgctgacaaagatggttcggtaaccttgccgacccaacctgtccaagaatttttgttaaagggacatgtgcgcgttagaccatataaagaaaaaccagtacaaaatcaagcaaaatctgttgatgtagaatatactgtacagtttactcctttaaaccctgatgacgatttcagaccagggctcaaagatactaagctattgaaaacactagctatcggtgacaccatcacatctcaagaattactagctcaagcacaaagcattttaaacaaaacccacccaggctatacgatttatgaacgtgactcctcaatcgtcactcatgacaatgacattttccgtacgattttaccaatggatcaagagtttacttaccatgtcaaaaatcgggaacaagcttatgagatcaatcctaaaacaggtattaaagaaaaaacgaacaacactgatctggtctctgagaaatattacgtccttaaacaaggggaaaagccgtatgatccctttgatcgcagtcacttgaaactgttcaccatcaaatacgttgatgtcaacaccaacgaattgctaaaaagcgagcagctcttaacagctagcgaacgtaacttagacttcagagatttatacgatcctcgtgataaggctaaactactctacaacaatctcgatgcttttgatatcatggactataccttaactggaaaagtagaggataatcacgataagaataatcgtgtcgttacagtttatatgggcaagcgccctaaaggggcaaagggtagctatcatttagcttatgataaagatctctataccgaagaagaacgaaaagcttacagctacctgcgtgatacagggacacctatacctgataaccctaaagacaaataa

SEQ ID NO: 658 - protein, 440 aa, Streptococcus pyogenes
MKNYLSIGVIALLFALTFGTVKSVQAIAGYGWLPDRPPINNSQLVVSMAGIVEGTDKKVFINFFEIDLTSQPAHGGKTEQGLSPKSKPFATDNGAMPHKLEKADLLKAIQKQLIANVHSNDGYFEVIDFASDATITDRNGKVYFADKDGSVTLPTQPVQEFLLKGHVRVRPYKEKPVQNQAKSVDVEYTVQFTPLNPDDDFRPGLKDTKLLKTLAIGDTITSQELLAQAQSILNKTHPGYTIYERDSSIVTHDNDIFRTILPMDQEFTYHVKNREQAYEINPKTGIKEKTNNTDLVSEKYYVLKQGEKPYDPFDRSHLKLFTIKYVDVNTNELLKSEQLLTASERNLDFRDLYDPRDKAKLLYNNLDAFDIMDYTLTGKVEDNHDKNNRVVTVYMGKRPKGAKGSYHLAYDKDLYTEEERKAYSYLRDTGTPIPDNPKDK

SEQ ID NO: 659 - DNA, 1260 bp, Streptococcus pyogenes
atgttaggaataataacctttattattatttttggtattttagtgattgtccatgaatttggacatttctattttgctaaaaaatcaggcattctagtaagagaatttgccattggaatgggccctaaaattttttctcatgttgaccaaggaggaactctttataccttgaggatgttacccttgggcggttatgtgcgaatggctggttggggtgatgacaaaactgagatcaaaacaggtactccagcaagtttaacccttaatgagcaaggttttgttaagcgcatcaacttgtctcaaagtaagttagacccaacgagtctcccaatgcatgttacaggctatgacttagaagatcagctgagtattactggcttagttttagaagaaaccaagacatataaggtcgctcacgatgctactattgttgaagaagacggtactgagataagaattgctccgcttgatgttcaatatcaaaatgctagtattggcggacgtttaatcaccaattttgcaggtcccatgaataattttattttagggattgtggtttttatcctcttggtctttttacaaggtgggatgccagattttagtagcaatcatgtccgtgttcaagaaaatggagcagcagctaaggctggtcttcgagataatgaccaaattgtcgcaattaatggttacaaggtgactagctggaatgatctcactgaggctgtagaccttgcaacacgggatctaggcccgtcacagaccattaaggtcacctacaagtcacatcagcgcttaaaaacggtggctgtgaaaccacaaaagcatgcaaagacatacacgataggagttaaggcgagtctgaaaacaggatttaaggataagctcttaggcggtctagaattagcttggagtagggcgtttactattttgaatgctttgaaaggattgatcactggctttagtctcaataaattaggtggacctgttgccatgtatgacatgtccaatcaggctgctcaaaacggcttagagtcagtcttatctcttatggcaatgctttcgatcaatttagggatctttaacctgattccgattcctgcacttgatgggggaaaaatcttgatgaatatcattgaagccattcgtcgcaagcctatcaagcaagaaacagaggcctatatcaccctagctggggttgctatcatggtcgtattgatgattgctgtgacatggaatgatatcatgcgcgtctttttctaa

SEQ ID NO: 660 - protein, 419 aa, Streptococcus pyogenes
MLGIITFIIIFGILVIVHEFGHFYFAKKSGILVREFAIGMGPKIFSHVDQGGTLYTLRMLPLGGYVRMAGWGDDKTEIKTGTPASLTLNEQGFVKRINLSQSKLDPTSLPMHVTGYDLEDQLSITGLVLEETKTYKVAHDATIVEEDGTEIRIAPLDVQYQNASIGGRLITNFAGPMNNFILGIVVFILLVFLQGGMPDFSSNHVRVQENGAAAKAGLRDNDQIVAINGYKVTSWNDLTEAVDLATRDLGPSQTIKVTYKSHQRLKTVAVKPQKHAKTYTIGVKASLKTGFKDKLLGGLELAWSRAFTILNALKGLITGFSLNKLGGPVAMYDMSNQAAQNGLESVLSLMAMLSINLGIFNLIPIPALDGGKILMNIIEAIRRKPIKQETEAYITLAGVAIMVVLMIAVTWNDIMRVFF

SEQ ID NO: 661 - DNA, 2163 bp, Streptococcus pyogenes
ttgagtccaattgcagtcaaaaatgacatgagacaattggactcaatttatcttgaaaatgaaaacgcttcattttatactgacattataggaggagatgacatgctatctcatgagctcatcagaaactatcaactcttttctaaatataaaggacattcactggaggcatttgaatccattttaaaggcaagcaaacgtcatatactggcagatattgctaaaatcaatgacacgttgtcactctatcagttaccccttattgctctggacaggcagctggtttatccgccagaccttactgaaaaggacttgttgaatcgcatgctacctaccttagacgactatctctttcaagatgagcgtctggatatgattatcatttacatcatgatggctaaagaatttatctccattaaccacttggaaagcttgttacggctcagcagaaattctgttattgctgatttaaacttggtgcgtgatcgggtacaagcttttcaggtaactttagcttacaatcgccaggatggttatttttttgaaggagaacccttagccttgcggcgtctcttagaatcagcggtcagttctcttttgcaagtcacatctggaccttgggtgttcagttacttattgcatgaacttggtttgcccgaccagaaaaaggtgatggcagcaacgttggaggaactgagcagggagaaccacttaacttttatttcggagaaattgagggatttgatttattttttctgccttctcgctcatcgaccattttcacggaacgtaagggctgaagcagtggatacttttcctttagcttcgccagctgttgaaacgatggtggaccagttattggtcaacttccccagtctaaccgaagaaaaatatttggttcaatctaggttacttggttgtatccaaggtgacttagagttagtctttcagcaacctatttatgacattatggaggaaatcatcaattcggtggcggttaacacgggattgtctatcaccgataccccagaacttcgtcagaacctatacagtcaccttttgccagcttattaccgactttactacgacattaacttgaccaatcctttgaaggaacaaatcaaacaagattatgaatctctcttttacttggtcaagcgcagcctttctcctctagaaaaacaattggggaaatcagttaatgaagatgaggttgcttattttaccattcattttgggagatggttgcaggcccctaagaagaggccaagcaatcagctggtagccttatctgtttgccctaatggcattagttcgtctctgatgttggaggcaaccttgaaggaactttttccacagctacagtttattaggattcaccagctggacaaaataaagttgttggatccagcatcctttgatttgattttttcaacagtagcttttgactgtgctaaacctgtttatgtgacgcaagctttgatgggacctgttgaaaaaatgatgttgaaaaagatggtctgtgatgactttcatcttcccttgtcagagcaattcgctttggatgatctgttgagtattattcataaacataccacgattactaataaagaaggacttgttagtgatttatcccgttacctgattggtaaccatttaacgattgaaaaaggaggtctaggactattggacttgttaacagcagattttattaggcaggctgatgctgtttcggattggcaggaagcgattcgtttggctgctcagcctttactagaacaccagatgattgaaacatcttatatcgatggcatgattgattcggtcaatgagcttggggcctatattgttttagcccctaaggtggctgttcctcatgcggcgcctgaaaaaggaacgcggcagttaggcatgtctctcttacaactaaaagaacctgtcagctttgatttgaagcaagaaggtgatccagacaagcaagtgcaattgatttttgttttgtctgctgtggattctagttcacatttgaaggctttgcaggaactgtcgttgattttagatgatgatgaacatattgagcaattaattgaggctaagaatactgaggaaataatgagtctgattagccatatgattgaaaaaggagacgaatcacatgattaa

SEQ ID NO: 662 - protein, 720 aa, Streptococcus pyogenes
MSPIAVKNDMRQLDSIYLENENASFYTDIIGGDDMLSHELIRNYQLFSKYKGHSLEAFESILKASKRHILADIAKINDTLSLYQLPLIALDRQLVYPPDLTEKDLLNRMLPTLDDYLFQDERLDMIIIYIMMAKEFISINHLESLLRLSRNSVIADLNLVRDRVQAFQVTLAYNRQDGYFFEGEPLALRRLLESAVSSLLQVTSGPWVFSYLLHELGLPDQKKVMAATLEELSRENHLTFISEKLRDLIYFFCLLAHRPFSRNVRAEAVDTFPLASPAVETMVDQLLVNFPSLTEEKYLVQSRLLGCIQGDLELVFQQPIYDIMEEIINSVAVNTGLSITDTPELRQNLYSHLLPAYYRLYYDINLTNPLKEQIKQDYESLFYLVKRSLSPLEKQLGKSVNEDEVAYFTIHFGRWLQAPKKRPSNQLVALSVCPNGISSSLMLEATLKELFPQLQFIRIHQLDKIKLLDPASFDLIFSTVAFDCAKPVYVTQALMGPVEKMMLKKMVCDDFHLPLSEQFALDDLLSIIHKHTTITNKEGLVSDLSRYLIGNHLTIEKGGLGLLDLLTADFIRQADAVSDWQEAIRLAAQPLLEHQMIETSYIDGMIDSVNELGAYIVLAPKVAVPHAAPEKGTRQLGMSLLQLKEPVSFDLKQEGDPDKQVQLIFVLSAVDSSSHLKALQELSLILDDDEHIEQLIEAKNTEEIMSLISHMIEKGDESHD

SEQ ID NO: 663 - DNA, 798 bp, Streptococcus pyogenes
atgacaactatgcaaaaaacaattagcttattatcactagctttacttattggtttgctggggacttctggcaaagccatatctgtgtatgcacaagatcagcacactgataatgttatagctgaatcaactattagtcaggtcagtgttgaagccagtatgcgtggaacagaaccttatattgatgctacagtcaccacagatcaacctgtcagacaaccaactcaggcaacgataacacttaaagacgctagtgataatactattaatagttgggtatatactatggcagcgcaacagcgtcgttttacagcttggtttgatttaactggacaaaagagtggtgactatcatgtaactgtcaccgttcatactcaagaaaaggcagtaactggtcaatcaggaactgttcattttgatcaaaacaaagctagaaaaacaccaactaatatgcaacaaaaggatacttctaaagcaatgacgaattcagtcgatgtagacacaaaagctcaaacaaatcaatcagctaaccaagaaatagattctacttcaaatcctttcagatcagctactaatcatcgatcaacttccttaaagcgatctactaaaaatgagaaacttacaccaactgctagtaatagccaaaaaaacggtagcaacaagacaaaaatgctagtggacaaagaggaagtaaaacctacttcaaaaagaggattcccttgggtcttattaggtctagtagtcagtttagctgcaggtttatttatagctattcaaaaagtatctagacgaaaataa

SEQ ID NO: 664 - protein, 265 aa, Streptococcus pyogenes
MTTMQKTISLLSLALLIGLLGTSGKAISVYAQDQHTDNVIAESTISQVSVEASMRGTEPYIDATVTTDQPVRQPTQATITLKDASDNTINSWVYTMAAQQRRFTAWFDLTGQKSGDYHVTVTVHTQEKAVTGQSGTVHFDQNKARKTPTNMQQKDTSKAMTNSVDVDTKAQTNQSANQEIDSTSNPFRSATNHRSTSLKRSTKNEKLTPTASNSQKNGSNKTKMLVDKEEVKPTSKRGFPWVLLGLVVSLAAGLFIAIQKVSRRK

SEQ ID NO: 665 - DNA, 1908 bp, Streptococcus pyogenes
atgatttggtcaattacaaaatctaacattaaaaaaaatttttcgttatatcgtatctattttctagctacgattggtttattaagtatttttatagcttttctaaattttatctcagataaaatcattacagaaaaaattggggatagtggtcaagctctagttatcgctaatgggtcattgatttttttgattgtatttttggtggtattcttaatttacttcaataatttctttgtaaaaaaacgtagtcaagagcttggagtcttagcaatactagggttttcaaaaagagaattaacaaaattactaactttagaaaatcttgttattctagttctgagttacttggtaagtttattgctgggaccgactttatattttttagctgtactggcaattactcatctattgaatttaacaatggaagttcagtggtttattacagttaatgagattatagagtctttaggaatattagtcgtagtttttctgattaatgtcatcacaaatggacttatcattagtaaacagtctttgattgaatttgttaatttctcaagaaaggctgagaaaaaaattaagataagaaaagtcagagctattattgctatcactgcattgctattgtcatatattttatgtttggcgacagtgttttcatccacacgaaatatgctattaagcatagggatggtaccggtttctctattgataattgtcttagttgttttaggaacagtgttcaccatcagatatggattggcttttgtagtttcgttgttaaaagaaaataaaaaaaggttataccgtcctctgtctaatatcatctatcccaaatttaactatcgtattgcaacaaaaaataaattattaacagtcttgggaggtcttttaacagtaaccgtttcagttgccggaatgatggtaatgctctatgcttattctcttaatgggatagagaggttgactccatctgccatagaatataatgttgaatcagaaaacggtcaagtcaatgttacaactattttagagaacgaccaagtgagcttggttgatgtcggcctgttgcgattgaatactatcccagaggtgactatcacagactctgggcaaacaataccttattttgatataattaactacagtgactacaaagagttaatgaaagctcaaggcagaacaaattctattgaaggtagtaagtcactcccattgttaataaattattatccaacagaaattagccttggaaaaacctttaacttaggaaatgcatatgatgttactgtaaaacaagtatcaacgaataatgtttttagtttttctacaagtgtcacgaccctggttgtttctgataaattatatgctaaacttagttctcgttttccagagaaagaaatgacaattaggacttttaatggaacttcgattaggtcaagtgaagcattttacaatcagtttagtatggttcctgatgttatcagtagttatagtaaggaacacacagtaaagactgctaatattgcgacttatatctttataactttcctatccatactctttattatttgtacaggtagtattctgtactttacaagcctcatcgaaatcatggaaaataaagaagaatatggctatctaagtaagctaggttatagtaaaaaaatgattcatcggattcttcgatatgaaacaggtatacttttccttattcctgtattcattgggattgtaaatggtggtatgttgcttatttactataaatatttattcatggatacattggtagcaggcaatatcataatgttatctttattgctttgtctgcttttcttcttgataatatatggcacattttatgtattgacattgcggttagtgacatccataatcaaaaattaa

SEQ ID NO: 666 - protein, 635 aa, Streptococcus pyogenes
MIWSITKSNIKKNFSLYRIYFLATIGLLSIFIAFLNFISDKIITEKIGDSGQALVIANGSLIFLIVFLVVFLIYFNNFFVKKRSQELGVLAILGFSKRELTKLLTLENLVILVLSYLVSLLLGPTLYFLAVLAITHLLNLTMEVQWFITVNEIIESLGILVVVFLINVITNGLIISKQSLIEFVNFSRKAEKKIKIRKVRAIIAITALLLSYILCLATVFSSTRNMLLSIGMVPVSLLIIVLVVLGTVFTIRYGLAFVVSLLKENKKRLYRPLSNIIYPKFNYRIATKNKLLTVLGGLLTVTVSVAGMMVMLYAYSLNGIERLTPSAIEYNVESENGQVNVTTILENDQVSLVDVGLLRLNTIPEVTITDSGQTIPYFDIINYSDYKELMKAQGRTNSIEGSKSLPLLINYYPTEISLGKTFNLGNAYDVTVKQVSTNNVFSFSTSVTTLVVSDKLYAKLSSRFPEKEMTIRTFNGTSIRSSEAFYNQFSMVPDVISSYSKEHTVKTANIATYIFITFLSILFIICTGSILYFTSLIEIMENKEEYGYLSKLGYSKKMIHRILRYETGILFLIPVFIGIVNGGMLLIYYKYLFMDTLVAGNIIMLSLLLCLLFFLIIYGTFYVLTLRLVTSIIKN

SEQ ID NO: 667 - DNA, 471 bp, Streptococcus pyogenes
atgcaaaatagtaagatacgacaaatgagtttaacagggatattgacagcattggttgttgttttaggaagatttgtcatgctacctactccaacaggttttttaacgctgttggatgcaggaatttatgctgtcagcttttcctttggatcagctcaaggagctattgtgggagggttatcaggttttttaatcgatttagtggcaggataccctcagtggatgtttcatagtttgattgctcacagtgtccaagggtattttgcgggatggagagggcgcaagcgttggcttggtgttgtgataggttcttttatcatgattttttggtactttttaggctctcttatgcttggttatggcctttcgggatctttagccggtatttggggaaacgtcatgcaaaatacattagggctttttgttggttttattatctttaaggccatattaaggcaaaaaaagagataa

SEQ ID NO: 668 - protein, 156 aa, Streptococcus pyogenes
MQNSKIRQMSLTGILTALVVVLGRFVMLPTPTGFLTLLDAGIYAVSFSFGSAQGAIVGGLSGFLIDLVAGYPQWMFHSLIAHSVQGYFAGWRGRKRWLGVVIGSFIMIFWYFLGSLMLGYGLSGSLAGIWGNVMQNTLGLFVGFIIFKAILRQKKR

SEQ ID NO: 669 - DNA, 654 bp, Streptococcus pyogenes
atgggaaaagaaataaaagtgaaatgctttttgcgtagatcagcttttggattagttgcggtgtcagcatcagtattagtcggttcaacagtatctgctgttgactcacctatcgaacagcctcgaattattccaaatggcggaaccttaactaatcttcttggcaatgctccagaaaaactggcattacgtaatgaagaaagagccattgatgaattaaaaaaacaagctattgaggataaagaagctacgacagctatagaagcagcaagttcagatgccttagaagcattagcggatcaaacagacgctttacaatcagaagaagctgcggttgttaaagcggataacgctgctagtgacgccttagaagcattggcggatcaaacagacgctttacaatcagaagaagctgaagtagttcaatcagataacgctgctagtgacgcctgggaaaaagcagcaactccaatcgctttagatgttaagaaaactaaagatacaaaacctgtagttaaaaaagaagaaagacaaaacgttaatacccttcctacaactggtgaagagtctaacccattctttacagctgctgcgcttgcaataatggtaagtacaggtgtgttagttgtaagttcaaagtgcaaagaaaattag

SEQ ID NO: 670 - protein, 217 aa, Streptococcus pyogenes
MGKEIKVKCFLRRSAFGLVAVSASVLVGSTVSAVDSPIEQPRIIPNGGTLTNLLGNAPEKLALRNEERAIDELKKQAIEDKEATTAIEAASSDALEALADQTDALQSEEAAVVKADNAASDALEALADQTDALQSEEAEVVQSDNAASDAWEKAATPIALDVKKTKDTKPVVKKEERQNVNTLPTTGEESNPFFTAAALAIMVSTGVLVVSSKCKEN

SEQ ID NO: 671 - DNA, 1662 bp, Streptococcus pyogenes
atgcccccccctccacaacttagacagcctaactgtagcaactcaaaaacagattcatcattaatagcatttaggtcaaaaaggtggcaaaagctaaaaaagctggtctttaccttttggcttttattatttacaatagaattattagagttaaaccctgaaaatgagggtttcttcctaaaaaatgatagcataaggagcataaaaatggctaaaaataacacgaatagacactattcgcttagaaaattaaaaacaggaacggcttcagtagcggtagctttgactgttttaggggcaggttttgcgaatcaaacagaggttaaggctaacggtgatggtaatcctagggaagttatagaagatcttgcagcaaacaatcccgcaatacaaaatatacgtttacgttacgaaaacaaggacttaaaagcgagattagagaatgcaatggaagttgcaggaagagattttaagagagctgaagaacttgaaaaagcaaaacaagccttagaagaccagcgtaaagatttagaaactaaattaaaagaactacaacaagactatgacttagcaaaggaatcaacaagttgggatagacaaagacttgaaaaagagttagaagagaaaaaggaagctcttgaattagcgatagaccaggcaagtcgggactaccatagagctaccgctttagaaaaagagttagaagagaaaaagaaagctcttgaattagcgatagaccaagcgagtcaggactataatagagctaacgtcttagaaaaagagttagaaacgattactagagaacaagagattaatcgtaatcttttaggcaatgcaaaacttgaacttgatcaactttcatctgaaaaagagcagctaacgatcgaaaaagcaaaacttgaggaagaaaaacaaatctcagacgcaagtcgtcaaagccttcgtcgtgacttggacgcatcacgtgaagctaagaaacaggttgaaaaagatttagcaaacttgactgctgaacttgataaggttaaagaagacaaacaaatctcagacgcaagccgtcaaggccttcgccgtgacttggacgcatcacgtgaagctaagaaacaggttgaaaaagatttagcaaacttgactgctgaacttgataaggttaaagaagaaaaacaaatctcagacgcaagccgtcaaggccttcgccgtgacttggacgcatcacgtgaagctaagaaacaagttgaaaaagctttagaagaagcaaacagcaaattagctgctcttgaaaaacttaacaaagagcttgaagaaagcaagaaattaacagaaaaagaaaaagctgaactacaagcaaaacttgaagcagaagcaaaagcactcaaagaacaattagcgaaacaagctgaagaacttgcaaaactaagagctggaaaagcatcagactcacaaacccctgatacaaaaccaggaaacaaagctgttccaggtaaaggtcaagcaccacaagcaggtacaaaacctaaccaaaacaaagcaccaatgaaggaaactaagagacagttaccatcaacaggtgaaacagctaacccattcttcacagcggcagcccttactgttatggcaacagctggagtagcagcagttgtaaaacgcaaagaagaaaactaa

SEQ ID NO: 672 - protein, 553 aa, Streptococcus pyogenes
MPPPPQLRQPNCSNSKTDSSLIAFRSKRWQKLKKLVFTFWLLLFTIELLELNPENEGFFLKNDSIRSIKMAKNNTNRHYSLRKLKTGTASVAVALTVLGAGFANQTEVKANGDGNPREVIEDLAANNPAIQNIRLRYENKDLKARLENAMEVAGRDFKRAEELEKAKQALEDQRKDLETKLKELQQDYDLAKESTSWDRQRLEKELEEKKEALELAIDQASRDYHRATALEKELEEKKKALELAIDQASQDYNRANVLEKELETITREQEINRNLLGNAKLELDQLSSEKEQLTIEKAKLEEEKQISDASRQSLRRDLDASREAKKQVEKDLANLTAELDKVKEDKQISDASRQGLRRDLDASREAKKQVEKDLANLTAELDKVKEEKQISDASRQGLRRDLDASREAKKQVEKALEEANSKLAALEKLNKELEESKKLTEKEKAELQAKLEAEAKALKEQLAKQAEELAKLRAGKASDSQTPDTKPGNKAVPGKGQAPQAGTKPNQNKAPMKETKRQLPSTGETANPFFTAAALTVMATAGVAAVVKRKEEN

SEQ ID NO: 673 - DNA, 3546 bp, Streptococcus pyogenes
ttgcgtaaaaaacaaaaattaccatttgataaacttgccattgcgctcatgtctacgagcatcttgctcaatgcacaatcagacattaaagcaaatactgtgacagaagacactcctgctaccgaacaagctgtagaaaccccacaaccaacagcggtttctgaggaagcaccatcatcaaaggaaaccaaaaccccacaaactcctgatgacgcagaagaaacaatagcagatgacgctaatgatctagcccctcaagctcctgctaaaactgctgatacaccagcaacctcaaaagcgactattagggatttgaacgacccttctcaggtcaaaaccctgcaggaaaaagcaggcaaaggagctgggactgttgttgcagtgattgatgctggttttgataaaaatcatgaagcgtggcgcttaacagacaaaaccaaagcacgttaccaatcaaaagaagatcttgaaaaagctaaaaaagagcacggtattacctatggcgagtgggtcaatgataaggttgcttattaccacgactatagtaaagatggtaaaaccgctgtcgatcaagagcacggcacacacgtgtcagggatcttgtcaggaaatgctccatctgaaacgaaagaaccttaccgcctagaaggtgcgatgcctgaggctcaattgcttttgatgcgtgtcgaaattgtaaatggactagcagactatgctcgtaactacgctcaagctatcatagatgctgtcaacttgggagctaaggtgattaatatgagctttggtaatgctgcactagcctatgccaaccttccagacgaaaccaaaaaagcctttgactatgccaaatcaaaaggtgttagcattgtgacctcagctggtaatgatagtagctttgggggcaagacccgtctacctctagcagatcatcctgattatggggtggttgggacacctgcagcggcagactcaacattgacagttgcttcttacagcccagataaacagctcactgaaactgctacggtcaaaacagccgatcagcaagataaagaaatgcctgttctttcaacaaaccgttttgagccaaacaaggcttacgactatgcttatgctaatcgtgggatgaaagaggatgattttaaggatgtcaaaggtaagattgcccttattgaacgtggcgatattgatttcaaagataagattgcaaacgctaaaaaagctggtgctgtaggagtcttgatctatgacaatcaggacaagggcttcccgattgaattgccaaatgttgatcagatgcctgcggcctttatcagtcgaaaagatggtctcttattaaaagagaatccccaaaaaaccatcaccttcaatgcgacacctaaggtattgccaacagcaagtggcaccaaactaagccgcttctcaagctggggtctgacagctgacggcaatattaagccagatattgcagcacccggccaagatattttgtcatcagtggctaacaacaagtatgccaaactttctggaactagtatgtctgcgccattagtagcgggtatcatgggactgttgcaaaagcaatatgagacacagtatcctgatatgacaccatcagagcgtcttgatttagctaaaaaagtattgatgagctcagcaactgccttatatgatgaagatgaaaaagcttatttttctcctcgccaacaaggagcaggagcagtcgatgctaaaaaagcttcagcagcaacgatgtatgtgacagataaggataatacctcaagcaaggttcacctgaacaatgtttctgataaatttgaagtaacagtaacagttcacaacaaatctgataaacctcaagagttgtattaccaagcaactgttcaaacagataaagtagatggaaaactctttgccttggctcctaaagcattgtatgagacatcatggcaaaaaatcacaattccagccaatagcagcaaacaagtcaccattccaatcgatgttagtcaatttagcaaggacttgcttgccccaatgaaaaatggctatttcttagaaggttttgttcgtttcaaacaagatcctacaaaagaagagcttatgagtattccctatattggtttccgaggtgattttggcaatctgtcagccttagaaaaaccaatctatgatagcaaagacggtagcagctactatcatgaagcaaatagtgatgccaaagaccaattagatggtgatggattacagttttacgctctgaaaaataactttacagcacttactacagagtctaatccatggacgattattaaagctgtcaaagaaggggttgaaaacatagaggatatcgaatcttcagagatcacagaaaccatttttgcaggtacttttgcaaaacaagacgatgatagccactactatatccaccgtcacgctaatggcaagccatatgctgcgatctctccaaatggggacggtaacagagattatgtccaattccaaggtactttcttgcgtaatgctaaaaaccttgtggctgaagtcttggacaaagaaggaaatgttgtttggacaagtgaggtaaccgagcaagttgttaaaaactacaacaatgacttggcaagcacacttggttcaacccgttttgaaaaaacgcgttgggacggtaaagataaagacggcaaagttgttgctaacggaacatacacctatcgtgttcgctacactccgattagctcaggtgcaaaagaacaacacactgattttgatgtgattgtagacaatacgacacctgaagtcgcaacatcggcaacattctcaacagaagatcgtcgtttgacacttgcatctaaaccaaaaaccagccaaccggtttaccgtgagcgtattgcttacacttatatggatgaggatctgccaacaacagagtatatttctccaaatgaagatggtacctttactcttcctgaagaggctgaaacaatggaaggcgctactgttccattgaaaatgtcagactttacttatgttgttgaagatatggctggtaacatcacttatacaccagtgactaagctattggaaggccactctaataaaccagaacaagacggttcagatcaagcaccagacaaaaaaccagaaactaaaccagaacaagacggttcaggtcaagcaccagataaaaaaccagaaactaaaccagaacaagacggttcaggtcaaacaccagacaaaaaaccagaaactaaaccagaacaagacggttcaggtcaaacaccagataaaaaaccagaaactaaaccagaaaaagatagttcaggtcaaacaccaggtaaaactcctcaaaaaggtcaaccttctcgtactctagagaaacgatcttctaagcgtgctttagctacaaaagcatcaacaaaagatcagttaccaacgactaatgacaaggatacaaatcgtttacatctccttaagttagttatgaccactttcttcttgggattagtagctcatatctttaaaacaaaacgcactgaagattag

SEQ ID NO: 674 - protein, 1181 aa, Streptococcus pyogenes
MRKKQKLPFDKLAIALMSTSILLNAQSDIKANTVTEDTPATEQAVETPQPTAVSEEAPSSKETKTPQTPDDAEETIADDANDLAPQAPAKTADTPATSKATIRDLNDPSQVKTLQEKAGKGAGTVVAVIDAGFDKNHEAWRLTDKTKARYQSKEDLEKAKKEHGITYGEWVNDKVAYYHDYSKDGKTAVDQEHGTHVSGILSGNAPSETKEPYRLEGAMPEAQLLLMRVEIVNGLADYARNYAQAIIDAVNLGAKVINMSFGNAALAYANLPDETKKAFDYAKSKGVSIVTSAGNDSSFGGKTRLPLADHPDYGVVGTPAAADSTLTVASYSPDKQLTETATVKTADQQDKEMPVLSTNRFEPNKAYDYAYANRGMKEDDFKDVKGKIALIERGDIDFKDKIANAKKAGAVGVLIYDNQDKGFPIELPNVDQMPAAFISRKDGLLLKENPQKTITFNATPKVLPTASGTKLSRFSSWGLTADGNIKPDIAAPGQDILSSVANNKYAKLSGTSMSAPLVAGIMGLLQKQYETQYPDMTPSERLDLAKKVLMSSATALYDEDEKAYFSPRQQGAGAVDAKKASAATMYVTDKDNTSSKVHLNNVSDKFEVTVTVHNKSDKPQELYYQATVQTDKVDGKLFALAPKALYETSWQKITIPANSSKQVTIPIDVSQFSKDLLAPMKNGYFLEGFVRFKQDPTKEELMSIPYIGFRGDFGNLSALEKPIYDSKDGSSYYHEANSDAKDQLDGDGLQFYALKNNFTALTTESNPWTIIKAVKEGVENIEDIESSEITETIFAGTFAKQDDDSHYYIHRHANGKPYAAISPNGDGNRDYVQFQGTFLRNAKNLVAEVLDKEGNVVWTSEVTEQVVKNYNNDLASTLGSTRFEKTRWDGKDKDGKVVANGTYTYRVRYTPISSGAKEQHTDFDVIVDNTTPEVATSATFSTEDRRLTLASKPKTSQPVYRERIAYTYMDEDLPTTEYISPNEDGTFTLPEEAETMEGATVPLKMSDFTYVVEDMAGNITYTPVTKLLEGHSNKPEQDGSDQAPDKKPETKPEQDGSGQAPDKKPETKPEQDGSGQTPDKKPETKPEQDGSGQTPDKKPETKPEKDSSGQTPGKTPQKGQPSRTLEKRSSKRALATKASTKDQLPTTNDKDTNRLHLLKLVMTTFFLGLVAHIFKTKRTED
